(19) United States
(12) Patent Application Publication
(10) Pub. No.: US 2024/0029819 A1
(43) Pub. Date: Jan. 25, 2024

(54) AGENTS BINDING MODIFIED ANTIGEN PRESENTED PEPTIDES AND USE OF SAME

(71) Applicant: Yeda Research and Development Co. Ltd., Rehovot (IL)

(72) Inventors: Yifat MERBL, Rehovot (IL); Assaf KACEN, Rehovot (IL); Yishai LEVIN, Rehovot (IL); David MORGENSTERN, Rehovot (IL)

(73) Assignee: Yeda Research and Development Co. Ltd., Rehovot (IL)

(21) Appl. No.: 18/140,095

(22) Filed: Apr. 27, 2023

Related U.S. Application Data
(63) Continuation of application No. PCT/IL2021/051275, filed on Oct. 27, 2021.

(30) Foreign Application Priority Data
Oct. 29, 2020 (IL) 278394

(51) Int. Cl. G16B 15/20; G16B 15/30; G16B 40/20

(52) U.S. Cl. CPC G16B 15/20; G16B 15/30; G16B 40/20

(57) ABSTRACT

Agents binding modified antigen dependent peptides and use of same are provided. Accordingly, there is provided an agent capable of specifically binding an MHC presented peptide comprising a post translational modification (PTM), wherein the agent does not bind a peptide having the same amino acid sequence as said peptide but does not comprise said modification. Also provided are polynucleotides encoding the agent, cells expressing same and methods of use thereof. Also provided is a computer implemented method for generating a dataset of PTM on MHC bound peptides.

### RELATED APPLICATIONS

[0001] This application is a Continuation (CON) of PCT Patent Application No. PCT/IL2021/051275 filed on Oct. 27, 2021, which claims the benefit of priority of Israel Patent Application No. 278394 filed on Oct. 29, 2020. The contents of the above applications are all incorporated by reference as if fully set forth herein in their entirety.

### SEQUENCE LISTING STATEMENT

[0002] The XML file, entitled 95815 Sequence Listing.xml, created on Apr. 27, 2023, comprising 53,760 bytes, submitted concurrently with the filing of this application is incorporated herein by reference.

### FIELD AND BACKGROUND OF THE INVENTION

[0003] The present invention, in some embodiments thereof, relates to agents binding modified antigen dependent peptides and use of same.

[0004] The major histocompatibility complex (MHC) molecule serve as a shuttle to transport and display peptide antigens on the surface of cells as an indication to the immune system of the health state of the cells. The species-specific MHC homologues in humans are termed human leukocyte antigens (HLA). MHC bound peptides (i.e., peptides bound to and presented by MHC molecules) originate from proteolysis of most of the proteins expressed in the cells. Therefore, unique sets of peptides are displayed by each of the different MHC haplotypes according to the protein expression and degradation schemes of the cells and according to the peptide binding motifs of the MHC molecules [reviewed e.g. in Neefjes et al. (2011) Nat Rev Immunol 11(12):823-36]. Therefore, thousands of different peptides are presented by the MHC molecules and each of the peptides is presented in different copy number per cell [de Verteuil et al. (2012) Autoimmun Rev. 11(9):627-35].

[0005] Targeting tumor antigens that are presented by MHC molecules holds great promise for cancer T cell therapies and immunotherapies. Typically, preferred tumor specific antigens are those present uniquely in tumor cells but are completely absent in non-cancerous tissues and therefore pose minimal risk of inducing autoimmune reactions. Less optimal, but more abundant, are peptides that are expressed at low levels in normal tissues but are over-expressed in tumors, preferably those involved with transformation or cancer progression [Rammensec and Singh-Jasuja (2013) Expert Rev Vaccines 12(10): 1211-1217].

[0006] In recent years, post-translational modifications (PTMs), such as phosphorylations, citrullinations or glycosylations¹⁰⁻¹⁶, have also been reported to modulate antigen presentation and recognition. These may be affected by changes in signaling pathways or in the activity of modifying enzymes in the cancerous state. However, due to the difficulties in detecting them, whether and to what extent such PTM alterations expand the landscape of antigenic targets in cancer, remained under-explored.

[0007] Current technologies for target antigen discovery rely mostly on genomic or transcriptomic data²⁷ combined with computational prediction tools for HLA binding²⁸⁻³⁰. Such data lacks information on the state of modification of the peptides. Mass Spectrometry (MS) based immunopeptidomics allows for the identification of MHC-bound peptides by immunoprecipitation of the MHC-peptide complex from the surface of cells and eluting the bound peptides. Detection of PTMs on such peptides generally still requires biochemical enrichment of the modification of interest^{15,31-34}. For example, phosphopeptides were identified through dedicated protocols¹¹, or specialized prediction software³⁵. However, even if one captures modified peptides with MS, they cannot be identified with the standard algorithms, which search against the canonical amino acid sequence. Adding potential modifications and non-canonical sequences to the theoretical search space exponentially increases the number of peptide possibilities, making search times impractical. Therefore, the vast majority of PTMs, and combination thereof, have not been examined to date.

### SUMMARY OF THE INVENTION

[0008] According to an aspect of some embodiments of the present invention there is provided an agent capable of specifically binding an MHC presented peptide comprising a post translational modification (PTM), wherein the peptide amino acid sequence is selected from the group consisting of SEQ ID NO: 1-10746, 10817, 10819, 10820, 10823, 10824, 10826 and 10827 having the corresponding modification according to Table 3, and wherein the agent does not bind a peptide having the same amino acid sequence as the peptide but does not comprise the modification.

[0009] According to an aspect of some embodiments of the present invention there is provided an agent capable of binding an MHC presented peptide, wherein the peptide comprises a ubiquitin or a ubiquitin-like (UBL) modifier tail, and wherein the agent does not bind a peptide having the same amino acid sequence as the peptide but does not comprise the tail.

[0010] According to some embodiments of the invention, the peptide amino acid sequence is selected from the group of sequences listed in Table 5.

[0011] According to an aspect of some embodiments of the present invention there is provided an agent capable of specifically binding an MHC presented peptide selected from the group consisting of SEQ ID NO: 10747-10816 and 10822.

[0012] According to some embodiments of the invention, the agent binds the peptide in an MHC-restricted manner.

[0013] According to some embodiments of the invention, the MHC is MHC class I.

[0014] According to some embodiments of the invention, the MHC is HLA class I.

[0015] According to some embodiments of the invention, the HLA class I comprises a haplotype selected from the group consisting of HLA-A0201, HLA-B5401, HLA-B5101, HLA-A6802. HLA-B4402, HLA-B4403 and HLA-A3101.

[0016] According to some embodiments of the invention, the agent is an antibody.

[0017] According to some embodiments of the invention, the agent is a T cell receptor (TCR) or a chimeric antigen receptor (CAR).

[0018] According to some embodiments of the invention, the agent comprises a therapeutic moiety.

[0019] According to some embodiments of the invention, the therapeutic moiety is selected from the group consisting of a toxin, a drug, a chemical, a protein and a radioisotope.

[0020] According to some embodiments of the invention, the therapeutic moiety is capable of eliciting an immune response to a cell presenting the peptide.

[0021] According to an aspect of some embodiments of the present invention there is provided a polynucleotide encoding the agent.

[0022] According to an aspect of some embodiments of the present invention there is provided a cell expressing the agent.

[0023] According to some embodiments of the invention, the cell is an immune cell.

[0024] According to some embodiments of the invention, the immune cell is a T cell.

[0025] According to an aspect of some embodiments of the present invention there is provided a method of eliciting an immune response in a subject in need thereof, the method comprising administering to the subject an effective amount of the agent or the cell, thereby eliciting an immune response in the subject.

[0026] According to an aspect of some embodiments of the present invention there is provided a method of treating cancer in a subject in need thereof, the method comprising administering to the subject a therapeutically effective amount of the agent or the cell, thereby treating the cancer in the subject.

[0027] According to an aspect of some embodiments of the present invention there is provided the agent or the cell, for use in treating cancer in a subject in need thereof.

[0028] According to an aspect of some embodiments of the present invention there is provided a method of eliciting an immune response in a subject in need thereof, the method comprising administering to the subject an effective amount of a peptide comprising an amino acid sequence selected from the group consisting of SEQ ID NO: 1-10746, 10817, 10819, 10820, 10823, 10824, 10826 and 10827 having the corresponding modification according to Table 3, thereby eliciting an immune response to a cell presenting the amino acid sequence having the corresponding modification in the subject.

[0029] According to an aspect of some embodiments of the present invention there is provided a method of eliciting an immune response in a subject in need thereof, the method comprising administering to the subject an effective amount of a peptide comprising an amino acid sequence having a ubiquitin or a ubiquitin-like (UBL) modifier tail, thereby eliciting an immune response to a cell presenting the amino acid sequence having the ubiquitin or the UBL modifier tail in the subject.

[0030] According to an aspect of some embodiments of the present invention there is provided a method of eliciting an immune response in a subject in need thereof, the method comprising administering to the subject an effective amount of a peptide comprising an amino acid sequence selected from the group consisting of SEQ ID NO: 10747-10816 and 10822, thereby eliciting an immune response to a cell presenting the amino acid sequence in the subject.

[0031] According to an aspect of some embodiments of the present invention there is provided a method of treating cancer in a subject in need thereof, the method comprising administering to the subject a therapeutically effective amount of a peptide comprising an amino acid sequence selected from the group consisting of SEQ ID NO: 1-10746, 10817, 10819, 10820, 10823, 10824, 10826 and 10827 having the corresponding modification according to Table 3, thereby treating the cancer in the subject.

[0032] According to an aspect of some embodiments of the present invention there is provided a method of treating cancer in a subject in need thereof, the method comprising administering to the subject a therapeutically effective amount of a peptide comprising an amino acid sequence having a ubiquitin or a ubiquitin-like (UBL) modifier tail, thereby treating the cancer in the subject.

[0033] According to an aspect of some embodiments of the present invention there is provided a method of treating cancer in a subject in need thereof, the method comprising administering to the subject a therapeutically effective amount of a peptide comprising an amino acid sequence selected from the group consisting of SEQ ID NO: 10747-10816 and 10822, thereby treating the cancer in the subject.

[0034] According to an aspect of some embodiments of the present invention there is provided a peptide comprising an amino acid sequence selected from the group consisting of SEQ ID NO: 1-10746, 10817, 10819, 10820, 10823, 10824, 10826 and 10827 having the corresponding modification according to Table 3, for use in treating cancer in a subject in need thereof.

[0035] According to an aspect of some embodiments of the present invention there is provided a peptide comprising an amino acid sequence having a ubiquitin or a ubiquitin-like (UBL) modifier tail, for use in treating cancer in a subject in need thereof.

[0036] According to an aspect of some embodiments of the present invention there is provided a peptide comprising an amino acid sequence selected from the group consisting of SEQ ID NO: 10747-10816 and 10822, for use in treating cancer in a subject in need thereof.

[0037] According to some embodiments of the invention, the amino acid sequence is selected from the group of sequences listed in Table 5.

[0038] According to some embodiments of the invention, the peptide is capable of eliciting an immune response to a cell presenting the amino acid sequence having the corresponding modification or the ubiquitin or UBL modifier tail.

[0039] According to some embodiments of the invention, the peptide is capable of eliciting an immune response to a cell presenting the amino acid sequence.

[0040] According to some embodiments of the invention, the peptide is capable of being presented by a MHC molecule.

[0041] According to some embodiments of the invention, the peptide amino acid sequence consists of the amino acid sequence.

[0042] According to some embodiments of the invention, the peptide is administered in a composition comprising an adjuvant.

[0043] According to some embodiments of the invention, the peptide is administered in a composition comprising an antigen presenting cell for presenting the peptide.

[0044] According to some embodiments of the invention, the antigen presenting cell is a dendritic cell.

[0045] According to an aspect of some embodiments of the present invention there is provided a method of detecting a cancer cell in a subject, the method comprising determining in a biological sample of the subject a cell surface level of a peptide having an amino acid sequence selected from the group consisting of SEQ ID NO: 1-10746, 10817, 10819, 10820, 10823, 10824, 10826 and 10827 and the corresponding modification according to Table 3, wherein a level of the peptide above a predetermined threshold and/or increased level relative to a reference biological sample of a healthy subject is indicative of presence of cancer cell in the subject, thereby detecting cancer cell in the subject.

[0046] According to an aspect of some embodiments of the present invention there is provided a method of detecting a cancer cell in a subject, the method comprising determining in a biological sample of the subject a cell surface level of a peptide selected from the group consisting of SEQ ID NO: 10747-10816 and 10822, wherein a level of the peptide above a predetermined threshold and/or increased level relative to a reference biological sample of a healthy subject is indicative of presence of cancer cell in the subject, thereby detecting cancer cell in the subject.

[0047] According to some embodiments of the invention, the cancer is selected from the group consisting of glioblastoma, B cell leukemia, meningioma, melanoma, colon cancer and breast cancer.

[0048] According to some embodiments of the invention, when the peptide amino acid sequence is selected from the group consisting of SEQ ID NO: 1-209 and 10819; the cancer is B cell leukemia, when the peptide amino acid sequence is selected from the group consisting of SEQ ID NO: 210-943; the cancer is breast cancer, when the peptide amino acid sequence is selected from the group consisting of SEQ ID NO: 944-1117 and 10820; the cancer is colon cancer, when the peptide amino acid sequence is selected from the group consisting of SEQ ID NO: 1118-1691 and 10817: the cancer is glioblastoma, when the peptide amino acid sequence is selected from the group consisting of SEQ ID NO: 1962-8276; the cancer is melanoma cancer and/or when the peptide amino acid sequence is selected from the group consisting of SEQ ID NO: 8277-8897; the cancer is meningioma.

[0049] According to an aspect of some embodiments of the present invention there is provided a computer implemented method for generating a dataset of post translations modifications (PTM) on major histocompatibility complex (MHC) bound peptides, comprising:
[0050] receiving a mass spectrometry (MS) dataset obtained from a sample of cells associated with a target disease for treatment, the MS dataset storing a plurality of spectra data elements outputted by a MS device analyzing MHC bound peptides to generate a plurality of amino acid sequences, each spectra data element for a respective amino acid sequence of the MHC bound peptides;
   [0051] receiving a reference sequence dataset storing amino acid sequences of proteins;
   [0052] receiving a variable modification dataset storing a plurality of modifications each including a respective amino acid and expected mast shift;
   [0053] generating a plurality of combination, each combination including a respective amino acid sequence selected from the reference sequence dataset and at least one modification selected from the variable modification dataset;
   [0054] searching using a plurality of processors connected in parallel, wherein each processor searches for a respective spectra element on the plurality of combinations to identify a plurality of best peptide to spectra matches (PSMs), wherein each respective processor assigns a ranking score to respective PSM according to the respective search performed by the respective processor;
   [0055] aggregating the plurality of PSMs from the plurality of processors connected in parallel to generate a main PSM list with main ranking score by computing the main ranking score from the ranking score of each respective PSM of each respective search;
   [0056] selecting highest ranking PSMs according to respective main ranking scores;
   [0057] storing in a modified sequence dataset, a plurality of modified sequences each including the PTM and sequences corresponding to the selected highest ranking PSMs, wherein the modified sequence dataset stores an indication of binding motifs defined by a plurality of identified PTM and corresponding sequence; and
   [0058] providing the modified sequence dataset for selecting a certain binding motif having a certain PTM and corresponding amino acid sequence from the modified sequence dataset capable of specifically binding an MHC presented peptide for treatment of the target disease.

[0059] According to some embodiments of the invention, the method further comprising:
[0060] creating a training dataset by labelling each modified sequence for each respective motif of the modified sequence dataset, each modified sequence including an amino acid sequence. PTM type, and position of the PTM on the amino acid sequence, each label including an indication of one or more of: an MHC type, parent gene, and position of the motif within a full protein length; and
[0061] training a machine learning (ML) model using the training dataset, wherein for an input of a certain modified sequence defined by a combination of an amino acid sequence and at least one PTM into the ML model, an indication of whether the certain modified sequence is predicted to fit a binding motif that binds to a cell of the MHC type is obtained as an outcome of the ML model, and
   for an input of an amino acid sequence of a full protein length and PTMs into the ML model, at least one modified sequence predicted to fit a binding motif is obtained as an outcome of the ML model.

[0062] According to some embodiments of the invention, at least one of:
[0063] the modified sequence dataset stores peptides selected from the group consisting of SEQ ID NO: 1-10746, 10817, 10819, 10820, 10823, 10824, 10826 and 10827,
[0064] the target disease comprises cancer, and the certain binding motif is selected for treating the cancer using immunotherapy, and
[0065] the MHC comprises HLA I.

[0066] According to some embodiments of the invention, searching comprises:
[0067] allocating a respective subset of the plurality of combinations to a plurality of processors connected for parallel processing, each respective processors searching the respective spectra element on the respective subset to identify a respective set of PSM,
   [0068] merging the respective set of PSM of each respective processor to create a PSM aggregation dataset,
[0069] wherein the highest ranking PSMs are selected from the PSM aggregation dataset.

[0070] According to some embodiments of the invention, statistical parameters used in a subsequent false discovery rate (FDR) calculation are distorted by a plurality of searches of a same reference dataset over different software instances executed by the plurality of processors, and wherein merging further comprises:
[0071] removing duplicated PSM from the PSM aggregation dataset by using unmodified hits combined histogram to evaluate a number of duplicated PSM and identify the duplicated PSM for removal thereof, and
   recalculating an expectation based on a restored score histogram for each PSM.

[0072] According to some embodiments of the invention, the method further comprising:
[0073] computing a plurality of quality assignment measures, and performing the following using the quality assignment measures:
[0074] validating the PTM of each member of the PSM aggregation dataset according to the quality measures;
[0075] filtering ambiguous assignments and isobaric decoys of the PSM aggregation dataset according to a filtering threshold;
[0076] ranking members of the PSM aggregation dataset; and
[0077] selecting the highest ranking PSMs according to the highest ranked member of the PSM aggregation dataset.

[0078] According to some embodiments of the invention, the method further comprising:
[0079] computing a probability score indicative of match accuracy for each PSM, wherein the highest ranking PSMs are selected according to highest probability.

[0080] According to some embodiments of the invention, the method further comprising:
[0081] dividing the PSM aggregation dataset into groups including: unmodified, standard search modification types, and other modification types, using a threshold cutoff based on respective abundance in the PSM aggregation dataset;
[0082] for each group the PSM are sorted by probability score and a threshold is set for assuring false identification is below the FDR limits.

[0083] According to some embodiments of the invention, a difference in probability scores is below a defined percentage of the average probability score, the lower-ranked PSM are obtained and added to the modified sequence dataset.

[0084] According to some embodiments of the invention, a certain PSM is identified as the highest ranking PSMs when the certain PSM is identified as having a highest probability score in one respective set of PSM and a lower ranked probability score in another respective set of PSM.

[0085] According to some embodiments of the invention, the method further comprising:
[0086] extracting the peaks from the PSM;
[0087] for each peak, computing a plurality of theoretical fragment ions for an unmodified version of the respective peptide and adjust each theoretical fragment ion according to the modification mass shift, and annotating the respective peak with the theoretical fragment ions.

[0088] According to some embodiments of the invention, the plurality of theoretical fragment ions includes a, b, y precursor and diagnostic ions with potential ammonium and water lost in expected peptide charges.

[0089] According to some embodiments of the invention, the method further comprising: for each PSM, searching for modification reporter ions, providing a number of b and y ions, and computing a proportion of ion current (PIC),

wherein unassigned peaks with significant intensity indicate a discrepancy between an observed spectrum defined by the respective spectra element of the plurality of PSMs and a matched peptide of the PSM.

[0090] According to some embodiments of the invention, the method further comprising:
[0091] for each PTM of each PSM, creating a window of potential site positions based on the annotated peaks.

[0092] According to some embodiments of the invention, at least one of: (i) including alternative site positions within the window, and (ii) including alternative combinations of modifications with equivalent mass.

[0093] According to some embodiments of the invention, for each respective PTM of each identified PSM:
[0094] searching for identical masses or combination of masses that match the respective PTM mass shift indicative of mass decoy and/or isobaric masses, and in response to finding the identical masses or combination of masses, removing the ambiguous respective identified PSM corresponding to the respective PTM.

[0095] According to some embodiments of the invention, the method further comprising excluding PSM with total peptide mass greater than average mass of a maximum peptide length plus a tolerance value.

[0096] According to some embodiments of the invention, the method further comprising, for each respective PSM, searching in a dataset of known PSM of healthy cells and cells with the target disease for a match, and increasing likelihood of the respective PSM being included in the modified sequence dataset when the PSM is found in the dataset of known PSM.

[0097] According to an aspect of some embodiments of the present invention there is provided a method for creating a ML model for predicting when a modified sequence binds to MHC, comprising:
[0098] creating a training dataset by labelling each modified sequence for each respective motif of the modified sequence dataset, each modified sequence including an amino acid sequence. PTM type, and position of the PTM on the amino acid sequence, the modified sequence dataset created as described, each label including an indication of one or more of: an MHC type, parent gene, and position of the motif within a full protein length; and
   [0099] training a machine learning (ML) model using the training dataset,
[0100] wherein for an input of a certain modified sequence defined by a combination of an amino acid sequence and at least one PTM into the ML model, an indication of whether the certain modified sequence is predicted to fit a binding motif that binds to a cell of the MHC type is obtained as an outcome of the ML model, and
   [0101] for an input of an amino acid sequence of a full protein length and PTMs into the ML model, at least one modified sequence predicted to fit a binding motif is obtained as an outcome of the ML model.

[0102] According to an aspect of some embodiments of the present invention there is provided a computer implemented method of predicting a motif on a target HLA complex, comprising
[0103] receiving an input of one of: (i) a certain modified sequence defined by an amino acid sequence and a PTM, and (ii) an amino acid sequence of a full protein length and PTMs;
[0104] feeding the input into an ML model; and
[0105] obtaining as an outcome of the ML model, for the input of (i) an indication of whether the certain modified sequence is predicted to fit a motif that binds to a cell of the MHC type, and for the input of (ii) obtaining at least one motif predicted to be created from the full protein length and PTMs.

[0106] Unless otherwise defined, all technical and/or scientific terms used herein have the same meaning as commonly understood by one of ordinary skill in the art to which the invention pertains. Although methods and materials similar or equivalent to those described herein can be used in the practice or testing of embodiments of the invention, exemplary methods and/or materials are described below. In case of conflict, the patent specification, including definitions, will control. In addition, the materials, methods, and examples are illustrative only and are not intended to be necessarily limiting.

### BRIEF DESCRIPTION OF THE SEVERAL VIEWS OF THE DRAWINGS

[0107] The patent or application file contains at least one drawing executed in color. Copies of this patent or patent application publication with color drawing(s) will be provided by the Office upon request and payment of the necessary fee.

[0108] Some embodiments of the invention are herein described, by way of example only, with reference to the accompanying drawings. With specific reference now to the drawings in detail, it is stressed that the particulars shown are by way of example and for purposes of illustrative discussion of embodiments of the invention. In this regard, the description taken with the drawings makes apparent to those skilled in the art how embodiments of the invention may be practiced.

[0109] In the drawings:

[0110] FIGS. 1A-H demonstrate that the computation pipeline for global search of PTMs on HLA-bound peptides enriches identifications by 11%. FIG. 1A is a schematic representation demonstrating that the protein Modification Integrated Search Engine (PROMISE) allows for the systematic detection of modifications on HLA peptides. FIG. 1B is a pie chart of peptides identified in the standard and multi-modification search performed on multiple immunopeptidomics datasets. Modified peptides identified only with the PROMISE analysis enriched total peptide identification by 11% (red line) compared to the original search (grey line). Enriched peptides were either matched to previously unassigned spectra (dark red) or improved an existing match with an assignment to a higher scoring peptide (light red). FIG. 1C-D are graphs demonstrating comparison of the amino acid composition of peptides identified in the standard or PROMISE search (FIG. 1C) or the unmodified and modified subsets of peptides in the PROMISE search (FIG. 1D). Circle size and color indicate the log 2 transformed ratio of amino acid abundance between the two subsets. FIG. 1E demonstrates the distribution of the lengths of modified and unmodified peptides. In FIGS. 1F-H the modifications are divided into those that may arise during sample processing (“technical”-shades of orange) and those that reflect the cellular state (“Biological”—blues). Peptides identified in standard search (FIG. 1F) or PROMISE (FIG. 1G) are binned by number and type of modification. When viewed by modification site, 33,481 positions were uniquely identified by PROMISE in the immunopeptidomics datasets analyzed. These sites are then presented in a pie chart divided by modification type, and amino acid modified (FIG. 1H).

[0111] FIGS. 2A-G demonstrate PTM driven binding preference highlighted through unbiased search of 29 modifications. FIG. 2A shows all the modified peptides identified with the re-analysis of the Bassani et al¹ dataset by PROMISE (n=12.268 peptides), sorted by the modification type and position in the peptide. Each line represents a distinct peptide in grey with the modification(s) site colored. For the peptides with more than one modification, the leading modification was defined by prioritizing biological modification over a technical one. The modification position can be evenly distributed in the peptide or reveal a distinct location tendency. FIG. 2B demonstrates length distribution of the percentage of peptides (density) at the indicated lengths with acetylation from the protein n-terminus (“nAcetylation”, blue) and length distribution of the other modified peptides (grey). Dotted line indicates mean length. In FIG. 2C-G the modified amino acid position distribution (“Modified”, red) was compared to the distribution of the unmodified amino acid that carries this modification in the analyzed datasets (“background”, grey) or identified in the IEDB² database (“IEDB”, blue). Major differences between those distributions suggest that the modified amino acid has position preferences not solely determined by the properties of the unmodified amino acid. Below each histogram, the fold change between the modified AA and unmodified AA distribution is presented as a heatmap bar (red indicates overrepresentation of the modified AA relative to the unmodified distribution). FIG. 2C demonstrates that the correlation between oxidized methionine position distribution and the un-modified methionine distribution is very high (Pearson 0.96, p value 1.05e-6), and as expected from a technical artifact the distributions are not significantly different (F-test; p value=0.1339). FIG. 2D shows the distribution of serine demonstrating that the phosphorylated form falls predominantly falls in the 4th position and significantly different from the unmodified serine distribution (F-test; p value=1.022e-14). In FIG. 2E the modification distributions are sorted by the correlation between the modified amino acid and the un-modified background. A low correlation means the PTM distribution is distinct from the unmodified background, suggesting a PTM-driven motif. FIG. 2F demonstrates that lysine residues are underrepresented at the second position of the peptide, however the distribution of the dimethylated form is enriched at the second position compared to the background (F-test; p value=2.2e-16). FIG. 2G demonstrates that methylated arginine is enriched in positions 3 to 7 compared to background arginine (F-test; p value=2.643e-13).

[0112] FIGS. 3A-G demonstrate the PTM driven HLA motif. In FIG. 3A, a recognition area score was calculated to determine the tendency of a given modification to be located in the MHC anchor position (purple) or center of the peptide (green) for a given HLA haplotype. FIGS. 3B-E demonstrates motif of the reported unmodified epitopes in the IEDB database for the indicated haplotype (top). The canonical modified motif was then compared to the amino acid motif for a given modification (middle). The histogram then represents the modified amino acid frequency in each position (red) compared to the unmodified amino acid background (grey). Each motif/histogram contains positions 1-7 from the N-terminus and the C-terminus and the preceding position (C-1). Overall, 9 mer epitopes are presented naturally with all their positions, positions 7 and C-1 are identical for 8 mer epitopes and peptides longer than 9 are truncated accordingly. FIG. 3B demonstrates Chemical mimics motif: Aspartic acid is favored in the A0101 binding motif at position 3. Because deamidated asparagine is chemically similar to aspartic acid, it has a similar distribution, while unmodified asparagine is not found in position 2. FIG. 3C demonstrates Binding interference: acetylated lysine is under-represented in the C-terminus of haplotype A0301 and altering the peptide to become an unfavorable binder. Figures D-E demonstrates novel motif: methylated glutamine at the peptide C-terminus in haplotype B5401 and oxidized proline at the anchor position 2 of haplotype A0201 create favorable binder peptides, which are different from the known unmodified motif. FIG. 3F-G show Rosetta FlexPepDock structural models of the interactions between the modified peptide (yellow sticks) and the MHC molecule (grey surface cartoon). The modified amino acid (green) creates a more stable interaction with the MHC molecule as compared to the unmodified form. The effect of the modified amino acid is shown in detail in the zoom-in picture. FlexPepDock reweighted score was calculated for the interaction between the MHC and modified or unmodified peptide. More negative score indicates a more stable interaction. FIG. 3D demonstrates the interaction between K(ac)P(ox)SLEQSPAVL (SEQ ID NO: 10817 having the recited modifications) and haplotype HLA-A0201: the proline hydroxyl group at position 2 forms a stabilizing hydrogen bond with MHC receptor residue E-87, while the lysine acetyl group at position 1 forms a hydrogen bond with K-90 (both shown as dashed green lines left and right, respectively). Other hydrogen bonds between peptide and receptor are shown in yellow dashed lines. FIG. 3G demonstrates the interaction between MPTLPPYQ(me) (SEQ ID NO: 10818 having the recited modification) and haplotype HLA-B5401: Methylation reduces the polar character of the glutamine side chain, allowing for stabilizing interaction with the c-terminal anchor pocket. The glutamine methyl group is shown as green sphere, MHC interacting residues shown as gray spheres. The modified peptide shows significant lower predicted affinity (measured as FlexPepDock reweighted score).

[0113] FIGS. 4A-F demonstrate that modified HLA-bound peptides create cancer-specific signatures. In FIG. 4A modified peptides from the Bassani et al¹ dataset (n=8700 peptides), were clustered, revealing a cancer-specific signature (left heatmap). For each modified peptide, the signal intensity ratio as compared to the unmodified peptide is presented using the same coordinates as the modified heatmap (right heatmap; grey indicates signal ratio, red indicates only the modified peptide was identified). Each modification type was then clustered as a separate group and a correlation was measured between the modified and unmodified peptide abundance for that group (“corr”, green). The order of modification types is sorted by the correlation value. A list of peptides of interest with their parent protein is shown on the left (SEQ ID NOs: 86, 10819, 10820, 139, 10821, 10822, 2192 having the recited modifications), colored blocks indicate the cell line in which the peptide was detected. In FIG. 4B the percent of immunopeptides identified with each of the indicated modifications was calculated for a cohort of triple-negative breast cancer tumors and adjacent tissue (Temette, N. et al³). The modifications are sorted from the most enriched in the tumor tissue at the top to the most enriched in adjacent tissue at the bottom. A students T-test was used to determine significance of the observed change in percentage: Cysteine cysteinylation is significantly enriched in the tumor (***p=0.00045) while histidine oxidation (*p=0.044), arginine citrullination (*p=0.013), lysine ubiquitination (**p=0.0031) and cysteine carbamidomethylation (**p=0.0078) are significantly enriched in the normal tissue. In FIGS. 4C-D each list of antigens is sorted by the modification of the peptide. For each peptide the cancer annotation is marked (driver, oncogene, tumor suppressor) as documented in CancerMine⁴ if the peptide was reported in IEDB 2 in its unmodified state, and if it is a cancer-testis antigens. For a cohort of patient samples (orange) the color indicates the percentage of the patients the peptide was identified in. For cancer cell lines (blue) the color indicates that the peptide was detected. FIG. 4C shows modified a list of cancer-testis antigens (n=244) and a list of shared antigens (n=400) identified through the modified state. FIG. 4D shows a list of HLA-A0201 bound modified peptides that were not reported in the IEDB database. FIG. 4E shows Rosetta FlexPepDock structural model of the interactions between TLIESK(me)LPV (SEQ ID NO: 10823 having the recited modification, yellow sticks) and the HLA-A0201 molecule (grey surface/cartoon). The methylated lysine (green) is packed against hydrophobic residues of the MHC molecule (gray spheres). The modification created a more stable interaction with the MHC molecule. In FIG. 4F, 6 modified peptides and their matching unmodified form from the list in FIG. 4D were tested for binding affinity through ProImmune in-vitro binding assay (SEQ ID NOs 10824, 10823, 9194, 9827, 10825, 10826 having the recited modifications). TLN(d)SLIYTL (SEQ ID NO: 10824 having the recited modification) was found to bind more strongly in its unmodified form. By contrast. TLIESK(me)LPV (SEQ ID NO: 10823 having the recited modification) and K(me)VMDEVAGI (SEQ ID NO: 9194 having the recited modification) were both found to bind the HLA-A0201 more strongly than the unmodified form. TLE(me)NCLLPD(me) (SEQ ID NO: 10825 having the recited modifications) bound the MHC only in its modified form.

[0114] FIG. 5 demonstrates KP(ox)LKVIFV (SEQ ID NO: 10827 having the recited modification) and HLA-A0201 3D interaction. Shown a Rosetta FlexPepDock structural model of the interaction between the modified peptide KP(ox)LKVIFV (SEQ ID NO: 10827 having the recited modification, yellow sticks) and the MHC molecule haplotype HLA-A0201 (grey surface\cartoon). The modified amino acid (green) creates a more stable interaction with the MHC molecule as compared to the unmodified form. The effect of the modified amino acid is shown in detail in the zoom-in picture. The proline hydroxyl group at position 2 forms a stabilizing hydrogen bond with MHC receptor residue E-87 (shown as dashed yellow line, as well as other hydrogen bonds between peptide and receptor). FlexPepDock reweighted score was calculated for the interaction between the MHC and modified or unmodified peptide. A more negative score indicates a more stable interaction.

[0115] FIGS. 6A-B shows example of peptides that were detected by analysis of Bassani et al¹ dataset with PROMISE (SEQ ID NOs: 86, 10819, 10820, 139, 10821, 10822, 3069 having the recited modifications). The modified form of the peptides was detected and the unmodified form was not. These peptides were uniquely detected in a specific cancer cell line. SPAG9 and ZNF165 are testis antigens, germline genes that are cancer-specific and are not expressed in healthy adult tissues. RASAL3 and RASIP1 are RAS GTPase-activating proteins that play a role in an important regulation pathway, often disturbed in cancer cell lines. BRCA2 is involved in DNA repair mechanisms. Spectra visualization for each modified peptide was created using PDV software² with default parameters. The modified amino acid is colored in the peptides sequence as it appear at the top of the annotated spectra.

[0116] FIG. 7 is a schematic representation of the PROtein Modification Integrated Search Engine (PROMISE) pipeline.

[0117] FIG. 8 is a schematic representation indicating PTMs as an additional regulatory layer modulating antigen presentation and recognition.

[0118] FIG. 9 is a flowchart of an exemplary process for generating a modified sequence dataset storing an indication of binding motifs defined by multiple PTM and corresponding sequence, in accordance with some embodiments of the present invention.

[0119] FIG. 10 is a flowchart of an exemplary process for generating an ML model using the modified sequence dataset, in accordance with some embodiments of the present invention.

[0120] FIG. 11 is a flowchart of an exemplary process for using the ML model trained using the modified sequence dataset, in accordance with some embodiments of the present invention.

[0121] FIG. 12 is a block diagram of a system for generating the modified sequence dataset and/or training the ML model on the modified sequence dataset and/or using the ML model trained on the modified sequence dataset, in accordance with some embodiments of the present invention.

[0122] FIGS. 13A-P demonstrates PTM-HLA haplotype motif extracted from the mono-allelic dataset. HLA haplotype motifs from NetMHCpan are presented at the top of the page, followed by the histogram of the site distribution for each identified modification type. The histogram represents the modified amino acid frequency in each position (red) compared to the unmodified amino acid background (grey). Each histogram contains positions 1-7 from the N-terminus and the C-terminus and the preceding position (C-1). Overall, 9 mer epitopes are presented naturally with all their positions, positions 7 and C-1 are identical for 8 mer epitopes and peptides longer than 9 are truncated accordingly.

[0123] FIG. 14 is a schematic representation demonstrating the search of ubiquitin tail on endogenous HLA peptides defines any tail length as a variable mass shift.

### DESCRIPTION OF SPECIFIC EMBODIMENTS OF THE INVENTION

[0124] The present invention, in some embodiments thereof, relates to agents binding modified antigen dependent peptides and use of same.

[0125] Before explaining at least one embodiment of the invention in detail, it is to be understood that the invention is not necessarily limited in its application to the details set forth in the following description or exemplified by the Examples. The invention is capable of other embodiments or of being practiced or carried out in various ways.

[0126] Targeting tumor antigens that are presented by MHC molecules (termed human leukocyte antigens (HLA) in human) holds great promise for cancer T cell therapies and immunotherapies. Typically, antigenic peptides are classified by their genetic origin, including mutations, cancer-germline genes expressed outside of their biological context, oncogenic virus genes, genes with highly tissue specific expression patterns, or overexpression of genes with low endogenous expression (FIG. 8, left block). In recent years, post-translational modifications (PTMs) have also been reported to modulate antigen presentation and recognition (FIG. 8, right block).

[0127] As is illustrated hereinunder and in the examples section, which follows, the present inventors developed a PROtein Modification Integrated Search Engine (PROMISE) in order to address the challenges and examine the potential landscape of modified peptides that are presented by MHC in a systematic and unbiased manner allowing rapid and combinatorial detection of multiple PTMs without prior biochemical enrichment (Example 1 hereinbelow). Utilizing this novel computational pipeline the present inventors uncovered and characterized HLA-bound PTM peptides across 210 samples including patient-derived tumor samples and cancer cell lines (Example 2 hereinbelow). Further, the present inventors revealed thousands of modified peptides which are expressed on cancer cells, creating cancer type-specific signatures (Example 3 hereinbelow). Furthermore, some of the identified modified peptides presented by the HLA molecules reside within known cancer-associated antigens or cancer driver genes. In addition, some of the identified peptides comprised remnants from ubiquitin and ubiquitin-like (UBL) modifiers, an observation never disclosed before. By systematic analysis of the locations of peptide modifications on specific HLA, combined with structural 3D modeling and HLA-binding assays, the present inventors further uncovered PTM-driven motifs across many haplotypes, in many cases altering peptide binding or the T cell recognition region of the peptide (Examples 2-3 hereinbelow).

[0128] In addition, using this methodology, the present inventors have identified novel HLA-I bound peptides presented on cancerous cells (Example 4 hereinbelow).

[0129] Taken together, the present teachings have identified several HLA-restricted modified and un-modified peptides that can be used e.g. as targets for cancer therapy.

[0130] Alternatively or additionally, these modified and un-modified peptides can be used as therapeutics per-se as e.g. anti-cancer vaccines.

[0131] Thus, according to an aspect of the present invention, there is provided an agent capable of specifically binding an MHC presented peptide comprising a post translational modification (PTM), wherein said peptide amino acid sequence is selected from the group consisting of SEQ ID NO: 1-10746, 10817, 10819, 10820, 10823, 10824, 10826 and 10827 having the corresponding modification according to Table 3 hereinbelow, and wherein said agent does not bind a peptide having the same amino acid sequence as said peptide but does not comprise said modification.

[0132] According to an additional or an alternative aspect of the present invention, there is provided an agent capable of binding an MHC presented peptide, wherein said peptide comprises a ubiquitin or a ubiquitin-like (UBL) modifier tail, and wherein said agent does not bind a peptide having the same amino acid sequence as said peptide but does not comprise said tail.

[0133] According to an additional or an alternative aspect of the present invention, there is provided an agent capable of specifically binding an MHC presented peptide selected from the group consisting of SEQ ID NO: 10747-10816 and 10822.

[0134] As used herein, the term “post-translational modification (PTM)” refers to a chemical modification naturally added to an amino acid residue of a protein or a peptide following its translation. Non-limiting Examples of a post-translational modification include acetylation, amidation, deamidation, alkylation, butyrylation, glycosylation, malonylation, hydroxylation, iodination, nucleotide addition, oxidation, phosphorylation, sulfation, succinylation, ubiquitination, myristolyation, palmitoylation, isoprenylation, methylation, citrullination, sumoylation, cysteinylation.

[0135] It will be appreciated that, the post-translation modification can be added synthetically to a peptide.

[0136] According to specific embodiments, the PTM is selected from the group of modifications listed in Table 2 hereinbelow.

[0137] According to specific embodiments, the modified peptide is selected from the group of peptides listed in Table 3 hereinbelow, wherein each possibility represents a separate embodiment of the present invention.

[0138] According to specific embodiments, the modified peptide amino acid sequence is selected from the group of consisting of SEQ ID NO: 1-10746, 10817, 10819, 10820, 10823, 10824, 10826 and 10827 having the corresponding modification according to Table 3 hereinbelow, wherein each possibility represents a separate embodiment of the present invention.

[0139] According to specific embodiments, the modified peptide amino acid sequence is selected from the group of consisting of SEQ ID NO: 1-209 and 10819 having the corresponding modification according to Table 3 hereinbelow, wherein each possibility represents a separate embodiment of the present invention.

[0140] According to specific embodiments, the modified peptide amino acid sequence is selected from the group of consisting of SEQ ID NO: 210-943 having the corresponding modification according to Table 3 hereinbelow, wherein each possibility represents a separate embodiment of the present invention.

[0141] According to specific embodiments, the modified peptide amino acid sequence is selected from the group of consisting of SEQ ID NO: 944-1117 and 10820 having the corresponding modification according to Table 3 hereinbelow, wherein each possibility represents a separate embodiment of the present invention.

[0142] According to specific embodiments, the modified peptide amino acid sequence is selected from the group of consisting of SEQ ID NO: 1118-1691 and 10817 having the corresponding modification according to Table 3 hereinbelow, wherein each possibility represents a separate embodiment of the present invention.

[0143] According to specific embodiments, the modified peptide amino acid sequence is selected from the group of consisting of SEQ ID NO: 1692-8276 having the corresponding modification according to Table 3 hereinbelow, wherein each possibility represents a separate embodiment of the present invention.

[0144] According to specific embodiments, the modified peptide amino acid sequence is selected from the group of consisting of SEQ ID NO: 8277-8897 having the corresponding modification according to Table 3 hereinbelow, wherein each possibility represents a separate embodiment of the present invention.

[0145] According to a specific embodiment, the PTM comprises a ubiquitin or a ubiquitin-like (UBL) modifier tail.

[0146] As used herein, the phrase “ubiquitin or a ubiquitin-like (UBL) modifier tail” refers to attachment of ubiquitin (pfam PF00240) or a fragment thereof to a lysine residue of a peptide (see FIG. 14). “A fragment of ubiquitin”, as used herein, refers to at least one amino acid (i.e. at least G) from the C-terminus of ubiquitin.

[0147] Thus, according to specific embodiments, the modified peptide amino acid sequence is selected from the group of sequences listed in Table 5 hereinbelow.

[0148] According to specific embodiments, the modified peptide amino acid sequence is selected from the group of sequences listed in Table 5 hereinbelow having the corresponding ubiquitin or a ubiquitin-like (UBL) modifier tail according to Table 5 hereinbelow.

[0149] According to specific embodiments, the modified peptide amino acid sequence is selected from the group of sequences listed in Table 5 hereinbelow having the corresponding modification according to Table 5 hereinbelow.

[0150] According to specific embodiments the modified peptide is further qualified by spectral validation by e.g. mass spectrometry; MHC binding assays such as flow cytometry, immunoprecipitation, immunostaining; and/or reactivity assays such as in-vitro or in-vivo assessment of CD8+ T cells activation, viability and/or killing by methods known in the art.

Lengthy table referenced here
US20240029819A1-20240125-T00001
Please refer to the end of the specification for access instructions.

[0151] According to specific embodiments, the peptide is selected from the group of peptides listed in Table 4 hereinbelow, wherein each possibility represents a separate embodiment of the present invention.

[0152] According to specific embodiments, the peptide is selected from the group of consisting of SEQ ID NO: 10747-10816 and 10822, wherein each possibility represents a separate embodiment of the present invention.

[0153] According to specific embodiments, the peptide is selected from the group of consisting of SEQ ID NO: 10747-10748, wherein each possibility represents a separate embodiment of the present invention.

[0154] According to specific embodiments, the peptide is selected from the group of consisting of SEQ ID NO: 10749-10756 and 10822, wherein each possibility represents a separate embodiment of the present invention.

[0155] According to specific embodiments, the peptide is as set forth in SEQ ID NO: 10757, wherein each possibility represents a separate embodiment of the present invention.

[0156] According to specific embodiments, the peptide is selected from the group of consisting of SEQ ID NO: 10758-10796, wherein each possibility represents a separate embodiment of the present invention.

[0157] According to specific embodiments, the peptide is selected from the group of consisting of SEQ ID NO: 10797-10806, wherein each possibility represents a separate embodiment of the present invention.

TABLE 4
list of HLA-1 bound peptides
expressed on tumor cells

| SEQ | | | |
|---|---|---|---|
| ID | | | |
| NO: | Peptide | Gene | Cancer type |
| 10747 | CQICITYI | CARD16 | B-cell-leukemia |
| 10748 | KLNQKRAELK | DNAH3 | B-cell-leukemia |
| 10749 | GDLCRICQM | 7 Mar | Breast |
| 10750 | TQELQQAK | CENPF | Breast |
| 10751 | QAMQFGQLL | | Breast |
| 10752 | QEIDFLQQLY | | Breast |
| 10753 | GELIIWDALDW | WDR41 | Breast |
| 10754 | GYSNGVIN | SMARCA2 | Breast |
| 10755 | QDCAVLQQSSL | HARBI1 | Breast |
| 10756 | KKLLQLKNEN | RASGRP3 | Breast |
| 10757 | HQQAEVFIV | CATIP | Colon |
| 10758 | LPVSICRSCETL | SASH1 | Melanoma |
| 10759 | LTECPEIEICY | PARP14 | Melanoma |
| 10760 | DVIGDEICCW | KCTD10 | Melanoma |
| 10761 | TLQPGCGRPQV | | Melanoma |
| 10762 | THSHTCQCF | ELP1 | Melanoma |
| 10763 | PYVCQVCQF | ZNF280C | Melanoma |
| 10764 | PQLPQSSQL | GLG1 | Melanoma |
| 10765 | DVLGDEICCW | | Melanoma |
| 10766 | TQVIKVLNP | AP1G1 | Melanoma |
| 10767 | AVCGKVKCK | SNX14 | Melanoma |
| 10768 | QSNETALHYF | SELIL | Melanoma |
| 10769 | KLWACNFCF | SEC23B | Melanoma |
| 10770 | LSVAPQQSLVL | BCS1L | Melanoma |
| | LED | | |
| 10771 | VCTIISDPTCE | GPNMB | Melanoma |
| | ITQN | | |
| 10772 | QLLPNSQSFI | TAF4B | Melanoma |
| 10773 | VQQAGQLAR | HPS1 | Melanoma |
| 10774 | SNSTARNVTW | SERPINH1 | Melanoma |
| 10775 | QNLSFGAT | LRRC40 | Melanoma |
| 10776 | LQKLVRIQL | | Melanoma |
| 10777 | TRHDCPVCL | CREBBP | Melanoma |
| 10778 | RTFCKKCGK | RPL36A | Melanoma |
| 10779 | LINNDLYRI | ZCRB1 | Melanoma |
| 10780 | GVSGVCVCK | IGFBP7 | Melanoma |
| 10781 | KMKLKQQRV | | Melanoma |
| 10782 | KSREDCCTKF | GPM6B | Melanoma |
| 10783 | CTDCYSNEY | FHL2 | Melanoma |
| 10784 | THDCCYDHL | PLA2G2D | Melanoma |
| 10785 | THIQQAPAL | RERE | Melanoma |
| 10786 | YCKNKPYPKS | RPLIOL | Melanoma |
| | RFC | | |
| 10787 | TNAVIFSQKI | ORC2 | Melanoma |
| 10788 | TQLTMNVPFQ | SLC25A28 | Melanoma |
| 10789 | TRCGCVTML | MED16 | Melanoma |
| 10790 | GPHQQSHQES | FLG | Melanoma |
| | ARD | | |
| 10791 | FLEDVLNEIQ | RARS2 | Melanoma |
| 10792 | GEIICKCGQAW | IFIH1 | Melanoma |
| 10793 | EHCGCYTLL | MYLK | Melanoma |
| 10794 | PEGQPGPWGQAL | FBN3 | Melanoma |
| 10795 | RQNVPRKV | CPXM2 | Melanoma |
| 10796 | LYAKCIPCI | FCF1 | Melanoma |
| 10797 | TGGDNQLLLY | PDE10A | Meningioma |
| 10798 | YSQEIENHY | NWD2 | Meningioma |
| 10799 | YHCHCRIVL | NEU1 | Meningioma |
| 10800 | KTNISHNGTY | FCGRIB | Meningioma |
| 10801 | TDQVIQNEMP | | Meningioma |
| 10802 | QSDCSCSTV | TYROBP | Meningioma |
| 10803 | RSLSNSTARN | SERPINH1 | Meningioma |
| | VTW | | |
| 10804 | RVQDVACRCR | STABI | Meningioma |
| 10805 | PNNHIGISF | FLNB | Meningioma |
| 10806 | LAQAVSTQLY | FAM120C | Meningioma |
| 10807 | KICCGIIYK | SINHCAF | B-cell-leukemia, |
| | | | Melanoma |
| 10808 | NIHSIVVQV | PCDH15 | Breast, |
| | | | Glioblastoma, |
| | | | Meningioma, |
| | | | Melanoma |
| 10809 | GADGNIFVEN | | Glioblastoma, |
| | | | Melanoma |
| 10810 | QSNEMVLQ | | Glioblastoma, |
| | | | Meningioma |
| 10811 | STNHTVNHTY | GPNMB | Meningioma, |
| | | | Melanoma |
| 10812 | FTDCYKCFY | PMF1 | Meningioma, |
| | | | Melanoma |
| 10813 | TGQILKQTY | CSH2 | Meningioma, |
| | | | Melanoma |
| 10814 | CSDEASGCHY | NR3C1 | Meningioma, |
| | | | Melanoma |
| 10815 | TRCGCVTML | MED16 | Meningioma, |
| | | | Melanoma |
| 10816 | KKDSKNDNFK | NUP153 | Meningioma, |
| | | | Melanoma |
| 10822 | RPLDEKDTSM | SPAG9 | Breast |

TABLE 5
list of modified HLA-1 bound peptides having
an ubiquitin or ubiquitin-like (UBL)
modifier tail expressed on tumor cells

| SEQ | | |
|---|---|---|
| ID | | |
| NO: | Peptide | Peptide modificaiton |
| 15 | GTDEHVVCK | 8,C,Cysteinylation; |
| | | 9,K,Ubiquitylation |
| 22 | GTDEHVVCK | 9,K,Ubiquitylation |
| 52 | SVFDNSIKTFGV | 8,K,Ubiquitylation |
| 57 | DIIKHIVAK | 4,K,Ubiquitylation; |
| | | 5,H,Oxidation |
| 75 | DIIKHIVAK | 4,K,Ubiquitylation |
| 123 | KKGWPKGKS | 6,K,Oxidation; |
| | | 8,K,Ubiquitylation |
| 125 | AQCGKAFPK | 5,K,Ubiquitylation |
| 127 | NTQIFKTNTQTYREN | 3,Q,Deamidation; |
| | | 6,K,Ubiquitylation |
| 148 | NTQIFKTNTQTYREN | 6,K,Ubiquitylation |
| 150 | SSCGKFQTK | 5,K,Ubiquitylation |
| 181 | SLKYPDENGFDAFLK | 3,K,Ubiquitylation; |
| | | 8,N,Deamidation |
| 185 | RHRKKLYV | 3,R,Citrullination; |
| | | 5,K,Ubiquitylation |
| 209 | SLKYPDENGEDAFLK | 3,K,Ubiquitylation |
| 212 | RPKDYEVDATLKSLN | 12,K,Ubiquitylation; |
| | | 15,N,Deamidation |
| 213 | RPKDYEVDATLKSLN | 12,K,Ubiquitylation |
| 243 | SAQGSDVSLTACKV | 12,C,Cysteinylation; |
| | | 13,K,Ubiquitylation |
| 245 | TTAFQYIIDNKGIDS | 10,N,Deamidation; |
| | | 11,K,Ubiquitylation |
| 255 | SAQGSDVSLTACKV | 13,K,Ubiquitylation |
| 256 | TTAFQYIIDNKGIDS | 11,K,Ubiquitylation |
| 264 | FIDLLHDK | 4,L,Methylation; |
| | | 8,K,Ubiquitylation |
| 288 | GHQQLYWSHPRKFGQ | 12,K,Ubiquitylation |
| 291 | KSPAKPKAV | 3,P,Oxidation; |
| | | 5,K,Oxidation; |
| | | 6,P,Oxidation; |
| | | 7,K,Ubiquitylation |
| 345 | KTDQAQKAEGAGDAK | 1,K,Ubiquitylation; |
| | | 3,D,Methylation |
| 347 | YKDPLFKKLEQLKEV | 2,K,FAT10; |
| | | 7,K,FAT10; |
| | | 8,K,Ubiquitylation |
| 350 | VAKKKDKVKKGGP | 10,K,Ubiquitylation |
| 360 | SKMEFMTI | 2,K,Ubiquitylation |
| 403 | DGTFQKWASVVVPSG | 6,K,Ubiquitylation |
| 448 | AVMDSDTTGKLGF | 10,K,Ubiquitylation |
| 457 | DASKGDDLLPAGTED | 1,D,Methylation; |
| | | 4,K,Ubiquitylation |
| 469 | QVQLVESGGGLVKPG | 13,Q,Deamidation; |
| | | 3,K,Ubiquitylation |
| 475 | QPLDGLKTY | 1,Q,Methylation; |
| | | 7,K,Ubiquitylation |
| 482 | DATKGDDLLPAGTED | 4,K,Ubiquitylation |
| 485 | KQTALVELVKHK | 10,K,Ubiquitylation |
| 490 | KVQWKVDNALQSGNS | 1,K,Ubiquitylation; |
| | | 3,Q,Methylation |
| 503 | EDFDVKTY | 6,K,Ubiquitylation |
| 505 | RYISKYELDKAFS | 1,R,Citrullination; |
| | | 5,K,Ubiquitylation |
| 519 | SFDVVTKCV | 7,K,Ubiquitylation |
| 524 | GENIKQIF | 5,K,Ubiquitylation; |
| | | 6,Q,Methylation |
| 530 | LFLLPSLK | 8,K,Ubiquitylation |
| 539 | KESTLHLVL | 1,K,Ubiquitylation |
| 548 | KDLVQDCGF | 1,K,Ubiquitylation |
| 558 | VEAKDCLNVL | 4,K,Ubiquitylation |
| 562 | PGLARQAPKPRK | 11,R,Methylation; |
| | | 12,K,Ubiquitylation |
| 566 | PGKNVVTTL | 3,K,Ubiquitylation |
| 666 | QVQLVESGGGLVKPG | 3,K,Ubiquitylation |
| 685 | DLVEGGKYEFR | 7,K,Ubiquitylation |
| 690 | KTAKPKAAK | 4,K,Ubiquitylation; |
| | | S,P,Oxidation |
| 694 | AAQTKATFLKLAGPQ | 10,K,Ubiquitylation; |
| | | S,T,Phosphorylation; |
| | | 7,K,Ubiquitylation |
| 698 | EEEKIVKKL | 4,K,Ubiquitylation |
| 721 | VYCGKKAQLNI | 5,K,Ubiquitylation |
| 732 | VNVVPTFGKKKGPN | 10,K,Sumoylation; |
| | | 11,K,Ubiquitylation |
| 738 | NPGGYVAYSKAATVT | 10,K,Ubiquitylation |
| 741 | KAMKALESI | 4,K,Ubiquitylation |
| 751 | KEKFEKDKSEKED | 2,B,Methylation; |
| | | 6,K,Ubiquitylation; |
| | | 8,K,Ubiquitylation |
| 765 | PNMVTPGHACTQK | 3,K,Ubiquitylation |
| 766 | PGVLDRMMKKLDTNS | 10,K,Ubiquitylation; |
| | | 14,N,Deamidation |
| 773 | BYGGSVTGATCK | 13,K,Ubiquitylation |
| 793 | KKEGKIYRL | 5,K,Ubiquitylation |
| 794 | KKKKQVLKFTLD | 3,K,Ubiquitylation |
| 796 | KIGAVVGGVL | 1,K,Ubiquitylation |
| 826 | KVVSETNDTKVLRH | 1,K,Ubiquitylation; |
| | | 7,N,Deamidation |
| 844 | GSPVKAGVETTKPSK | 12,K,Ubiquitylation; |
| | | 15,K,Methylation |
| 847 | RQKDVKDGKYSQV | 9,K,Ubiquitylation |
| 927 | PGVLDRMMKKLDINS | 10,K,Ubiquitylation |
| 939 | KVVSETNDTKVLRH | 1,K,Ubiquitylation |
| 972 | TEEEKNFKA | 8,K,Ubiquitylation |
| 990 | STDKQMGY | 4,K,Ubiquitylation |
| 1045 | STDKQMGY | 4,K,Ubiquitylation |
| 1052 | APAQKAPAPKASGKK | 14,K,Methylation; |
| | | 15,K,Ubiquitylation |
| 1070 | KAMEEKLEA | 6,K,Ubiquitylation |
| 1079 | KGGKGLGKGGAK | 4,K,Ubiquitylation |
| 1080 | KGGKGLGK | 4,K,Ubiquitylation |
| 1090 | RGKAGKGLGKGGAK | 1,R,Citrullination; |
| | | 3,K,Ubiquitylation; |
| | | 6,K,Ubiquitylation |
| 1118 | FVTPLTSMVVTKPDD | 12,K,Ubiquitylation; |
| | | 14,D,Methylation |
| 1120 | FVTPLTSMVVTKPED | 12,K,Ubiquitylation |
| 1140 | FVTPLTSMVVTKPED | 8,K,Ubiquitylation |
| 1158 | TPGKKGAAIPAKGAK | 15,K,Ubiquitylation |
| 1163 | AGAGKVTKSAQKAQK | 14,Q,Methylation; |
| | | 15,K,Ubiquitylation |
| 1164 | HFDLSHGSAQVKGHG | 12,K,Ubiquitylation; |
| | | 14,H,Methylation |
| 1175 | SLIQTKCADDAMTL | 6,K,Ubiquitylation |
| 1182 | SNKGAIIGLMVGGVV | 2,N,Deamidation; |
| | | 3,K,Ubiquitylation |
| 1189 | IGFPGPPGPKG | 10,K,Ubiquitylation |
| 1195 | SNKGAIIGLMVGGVV | 3,K,Ubiquitylation |
| 1205 | KGAAIPAKGAKNGKN | 1,K,Ubiquitylation |
| 1206 | VLDELKNMKC | 10,K,Ubiquitylation; |
| | | 9,C,Cysteinylation |
| 1216 | SLIQTKCADDAMTL | 12,K,Ubiquitylation |
| 1217 | SPNIVIALAGNKADL | 12,K,Ubiquitylation; |
| | | 14,D,Methylation |
| 1227 | VLDELKNMKC | 10,K,Ubiquitylation |
| 1233 | KGAAIPAKGAKNGKN | 12,K,Ubiquitylation; |
| | | 1,N,Deamidation |
| 1238 | LAFEGTPEQK | 10,K,Ubiquitylation |
| 1259 | PVPEPEPEPEPEPVK | 13,P,Oxidation; |
| | | 15,K,Ubiquitylation |
| 1266 | FMGPLKKDRIAKEE | 12,K,Ubiquitylation; |
| | | 13,E,Methylation |
| 1288 | KGAAIPAKGAKNGKN | 12,K,Ubiquitylation |
| 1293 | VGSNKGAIIGLMVGG | 4,N,Deamidation; |
| | | 5,K,Ubiquitylation |
| 1305 | MNWNKGGPGTKR | 11,K,Ubiquitylation; |
| | | 1,M,Acetylation |
| 1312 | FTKFNADEFEDMVAE | 3,K,Ubiquitylation |
| 1314 | GGYVKLFPNSLDQTD | 5,K,Ubiquitylation |
| 1341 | DKPDMGEIASFDKAK | 2,K,Ubiquitylation |
| 1345 | KRTKKVGIVGKYG | 1,K,Ubiquitylation; |
| | | 2,R,Methylation |
| 1361 | VGSNKGAIIGLMVGG | 5,K,Ubiquitylation |
| 1365 | GYVKLFPNSLDQTDM | 4,K,Ubiquitylation |
| 1376 | IAGFLQKN | 6,Q,Deamidation; |
| | | 7,K,Ubiquitylation |
| 1383 | KRAKEAAEQDVEKKK | 4,K,Ubiquitylation; |
| | | 5,E,Methylation |
| 1387 | EKKQPVDLGLLEEDD | 2,K,Oxidation; |
| | | 3,K,Ubiquitylation |
| 1389 | KRTKKVGIVGKYG | 2,R,Methylation; |
| | | 4,K,Ubiquitylation |
| 1392 | EDDDVDTKKQKTDED | 10,Q,Deamidation; |
| | | 11,K,Ubiquitylation |
| 1403 | SGKVTFPK | 3,K,Ubiquitylation |
| 1420 | AKPEPVIEEVDLANL | 2,K,Ubiquitylation; |
| | | 4,E,Methylation |
| 1427 | KEADLAAQEEAAKK | 1,K,Ubiquitylation |
| 1431 | VLCPPPVKK | 8,K,Ubiquitylation |
| 1446 | VRKPVVSTISKGGYL | 11,K,Ubiquitylation; |
| | | 15,L,Methylation |
| 1490 | IAGFLQKN | 7,K,Ubiquitylation |
| 1492 | EDDDVDTKKQKTDED | 11,K,Ubiquitylation |
| 1517 | EDDDVDTKKQKTDED | 10,K,Ubiquitylation; |
| | | 11,Q,Deamidation; |
| | | 9,K,Ubiquitylation |
| 1539 | AEKCSQSNNQF | 3,K,Ubiquitylation |
| 1554 | NSQTKPGGLFGTSSF | 5,K,Ubiquitylation |
| 1564 | QKLSELDDRADALQ | 1,Q,Deamidation; |
| | | 2,K,Ubiquitylation |
| 1573 | KLHTGVKPH | 3,H,Oxidation; |
| | | 7,K,Ubiquitylation; |
| | | 9,H,Oxidation |
| 1575 | KKTATAVAHCK | 10,C,Cysteinylation; |
| | | 11,K,Ubiquitylation |
| 1576 | MKTVQKKCEKLQKNK | 10,K,Ubiquitylation; |
| | | 12,K,Ubiquitylation; |
| | | 13,K,Ubiquitylation; |
| | | 14,Q,Methylation; |
| | | 15,K,Ubiquitylation; |
| | | 2,N,Methylation; |
| | | 7,K,Ubiquitylation |
| 1589 | KHPPENIIDGNPETF | 1,K,Ubiquitylation; |
| | | 3,P,Oxidation; |
| | | 4,P,Oxidation |
| 1590 | LHYDPNKRIS | 7,K,Ubiquitylation; |
| | | 8,R,Methylation |
| 1605 | SNYGPMKSGNF | 7,K,Ubiquitylation |
| 1620 | RILPKPTRK | 5,K,Ubiquitylation |
| 1676 | EDDDVDTKKQKTDED | 10,K,Ubiquitylation; |
| | | 9,K,Ubiquitylation |
| 1683 | QKLSELDDRADALQ | 2,K,Ubiquitylation |
| 1686 | KLHTGVKPH | 7,K,Ubiquitylation |
| 1687 | KKTATAVAHCK | 11,K,Ubiquitylation |
| 1703 | KVNVDEVGGEALGRL | 1,K,Ubiquitylation |
| 1712 | TLVQTKGTGASGSFK | 6,K,Ubiquitylation |
| 1718 | PAYHSSLMDPDTKLI | 13,K,Ubiquitylation |
| 1759 | HPKYKTEL | 3,K,Ubiquitylation |
| 1788 | IPGHLNSYTIKGLKP | 14,K,Ubiquitylation |
| 1811 | GSEMVVAGKLQDRGP | 11,K,Ubiquitylation; |
| | | 9,Q,Deamidation |
| 1821 | GSEMVVAGKLQDRGP | 11,K,Ubiquitylation |
| 1860 | PAYHSSLMDPDTKLI | 13,K,Ubiquitylation |
| 1862 | PAYHSSLMDPDTKLI | 8,K,Ubiquitylation |
| 1896 | GERIEKVEHSDLSFS | 6,K,Ubiquitylation |
| 1900 | SSHKTFRIKRFL | 10,K,Ubiquitylation; |
| | | 9,R,Methylation |
| 1901 | SSHKTFRIKRFL | 9,K,Ubiquitylation; |
| | | 10,R,Methylation |
| 1963 | KYPDRVPVI | 1,K,Ubiquitylation |
| 2013 | KDSTYSLSSTLTLSK | 13,L,Methylation; |
| | | 15,K,Ubiquitylation |
| 2064 | KRGVAIAR | 1,K,Ubiquitylation; |
| | | 2,R,Citrullination |
| 2103 | GILNVSAVDKSTGKE | 14,K,Ubiquitylation |
| 2154 | YASTAKCL | 6,K,Ubiquitylation |
| 2158 | KIVPFFKL | 2,1,Methylation; |
| | | 7,K,Ubiquitylation |
| 2169 | QTVDLFEGKDMAA | 11,K,Ubiquitylation |
| 2171 | TYMRIYKKGDIVDIK | 5,1,Methylation; |
| | | 7,K,Ubiquitylation |
| 2176 | YLRGGAGVGSMTKIY | 13,K,Ubiquitylation |
| 2223 | DVKKEPLGR | 3,K,Ubiquitylation |
| 2234 | EGLTFQMKKNAEELK | 14,L,Methylation; |
| | | 15,K,Ubiquitylation |
| 2247 | QKKVEELEGEITT | 1,Q,Deamidation; |
| | | 2,K,Ubiquitylation |
| 2255 | TKRKWEAVHAAEQRR | 2,K,Dimethyl; |
| | | 3,R,Dimethyl; |
| | | 4,K,Ubiquitylation |
| 2305 | QKKVEELEGEITT | 2,K,Ubiquitylation |
| 2315 | ARGPKKHLKRV | 10,K,Ubiquitylation; |
| | | 9,R,Methylation |
| 2317 | ARGPKKHLKRV | 9,K,Ubiquitylation; |
| | | 10,R,Methylation |
| 2330 | RGKFAVVR | 3,K,Ubiquitylation |
| 2331 | VYSRHPAENGKSNFL | 11,K,Ubiquitylation |
| 2344 | TFQKWAAVVVPSG | 4,K,Ubiquitylation |
| 2435 | DLQKKLVPFATELHE | 4,K,Ubiquitylation |
| 2554 | FKRGADPGMPEPTVL | 2,K,Ubiquitylation |
| 2557 | SSHKTFRIKRFL | 12,K,Ubiquitylation; |
| | | 9,L,Methylation |
| 2559 | SSHKTFRIKRFL | 9,K,Ubiquitylation; |
| | | 12,L,Methylation |
| 2584 | RSWTAADMAAQITKR | 14,K,Ubiquitylation; |
| | | 15,R,Methylation |
| 2587 | KGKQSISK | 3,K,Ubiquitylation |
| 2682 | HKAVLTIDEKGTEA | 10,K,Ubiquitylation; |
| | | 13,E,Methylation |
| 2686 | PEAAVGLLKGTAL | 2,E,Methylation; |
| | | 9,K,Ubiquitylation |
| 2687 | RGKTYISK | 1,R,Methylation; |
| | | 3,K,Ubiquitylation |
| 2693 | RKLFYVHY | 2,K,Ubiquitylation |
| 2703 | KQKTFIVK | 2,Q,Methylation; |
| | | 3,K,Ubiquitylation |
| 2708 | GTNKVASQK | 4,K,Ubiquitylation |
| 2724 | ERQSAEDYEKEE | 10,E,Methylation; |
| | | 1,D,Methylation; |
| | | 7,K,Ubiquitylation |
| 2726 | EESEKLSKMSSLLE | 11,K,Ubiquitylation; |
| | | 5,S,Phosphorylation; |
| | | 7,K,Ubiquitylation; |
| | | 8,S,Phosphorylation |
| 2748 | KAVDKKAAGAGKVTK | 1,K,Dimethyl; |
| | | 5,K,Dimethyl; |
| | | 6,K,Ubiquitylation |
| 2761 | KGRLSKDDIDRMVQE | 1,K,Ubiquitylation; |
| | | 3,R,Citrullination |
| 2762 | DVKKEPLGR | 3,K,Ubiquitylation |
| 2867 | GQKDSYVGDEAQSKR | 12,Q,Deamidation; |
| | | 14,K,Ubiquitylation |
| 2907 | AEIRLVSKDGKSKGI | 13,K,Ubiquitylation; |
| | | 15,I,Methylation |
| 2919 | GTRYVQKGEYRTNPE | 6,Q,Deamidation; |
| | | 7,K,Ubiquitylation |
| 2930 | ILYGKIIHL | 5,K,Ubiquitylation |
| 2936 | FLEQVHQGIKGM | 10,1,Methylation; |
| | | 9,K,Ubiquitylation |
| 2954 | KLRKRLAPL | 2,L,Methylation; |
| | | 4,K,Ubiquitylation; |
| | | 6,L,Methylation; |
| | | 9,L,Methylation |
| 2955 | PNNLKPVVAEFYGSK | 4,L,Methylation; |
| | | 5,K,Ubiquitylation |
| 2975 | GKQLEDGRTL | 2,K,Ubiquitylation |
| 2976 | IAEERDKRLAAKQSS | 12,K,Ubiquitylation |
| 3121 | GQKDSYVGDEAQSKR | 14,K,Ubiquitylation |
| 3125 | GTRYVQKGEYRTNPE | 7,K,Ubiquitylation |
| 3136 | KEFTPPVQAAYQKVV | 12,Q,Methylation; |
| | | 13,K,Ubiquitylation |
| 3150 | PDLKLVPPMEEDYPQ | 13,K,Ubiquitylation; |
| | | 4,Y,Phosphorylation |
| 3158 | PEEDKKTYGEIFEKF | 2,E,Methylation; |
| | | S,K,Ubiquitylation |
| 3248 | VKKQKKPLVGKKAAA | 2,K,Ubiquitylation |
| 3259 | SPADKTNVKAAWGKV | 14,K,Ubiquitylation |
| 3282 | TPGAEDKGK | 6,D,Methylation; |
| | | 7,K,Ubiquitylation |
| 3431 | STDVKGCSMY | 5,K,Ubiquitylation |
| 3437 | ETRPAGDGTFQK | 11,Q,Deamidation; |
| | | 12,K,Ubiquitylation |
| 3444 | VIQHFQEKVESLEQE | 12,K,Ubiquitylation; |
| | | 8,L,Methylation |
| 3454 | KYLQAKLTQF | 6,K,Ubiquitylation; |
| | | 7,L,Methylation |
| 3459 | KYPDRVPVI | 1,K,Ubiquitylation |
| 3477 | LGEEKGGASLSPQYV | 1,L,Methylation; |
| | | 5,K,Ubiquitylation |
| 3492 | AVFEWHITKGGNI | 12,K,Ubiquitylation; |
| | | 9,N,Methylation |
| 3500 | TQIFKTNTQTYRESL | 5,K,Ubiquitylation |
| 3518 | KKWGKSKKK | 5,K,Ubiquitylation |
| 3533 | KIFNVAIPRF | 1,K,Ubiquitylation |
| 3542 | TGKTTFVK | 3,K,Ubiquitylation |
| 3555 | TEKLVTSKGDKELRT | 11,K,Ubiquitylation |
| 3556 | VDSKGFDEYMKELGV | 11,K,Ubiquitylation |
| 3574 | GPSVPKMMNLKGNPE | 7,K,Ubiquitylation |
| 3575 | ADADADLEERLKNLR | 12,K,Ubiquitylation; |
| | | 13,N,Deamidation |
| 3583 | ADKTNVKAAWGKVG | 2,D,Methylation; |
| | | 3,K,Ubiquitylation |
| 3584 | GHKPPGSSEPITVKF | 3,K,Ubiquitylation |
| 3592 | KTKDGVREV | 3,K,Ubiquitylation |
| 3597 | KTATAVAHCK | 10,K,Ubiquitylation |
| 3598 | RLAPDYDALDVANKI | 14,K,Ubiquitylation |
| 3599 | RKLVATKL | 2,K,Ubiquitylation |
| 3600 | HFDLSHGSAQVKGH | 10,Q,Methylation; |
| | | 12,K,Ubiquitylation |
| 3609 | RAQDLPLKK | 8,K,Ubiquitylation |
| 3611 | RSHTGKYSI | 1,R,Dimethyl; |
| | | 6,K,Ubiquitylation |
| 3618 | GTKDTVSTGLTGAVN | 3,K,Ubiquitylation; |
| | | 4,D,Methylation |
| 3619 | GTKDTVCSGVTGAAN | 3,K,Ubiquitylation; |
| | | 4,D,Methylation |
| 3627 | FKRGADPGMPEPTVL | 2,K,Ubiquitylation |
| 3636 | VTATALKT | 7,K,Ubiquitylation |
| 3641 | PDGIGKLKKL | 6,K,Ubiquitylation; |
| | | 8,K,Ubiquitylation; |
| | | 9,K,Ubiquitylation |
| 3669 | PFKLFEIDPTSGVVS | 3,K,Ubiquitylation |
| 3942 | ETRPAGDGTFQK | 12,K,Ubiquitylation |
| 3963 | ADADADLEERLKNLR | 12,K,Ubiquitylation |
| 4023 | VHKAVLTIDEKGTEA | 10,E,Methylation; |
| | | 11,K,Ubiquitylation |
| 4039 | VLNTNIDGRRKI | 10,R,Methylation; |
| | | 11,K,Ubiquitylation |
| 4054 | RLKNEGATVK | 3,K,Ubiquitylation; |
| | | 4,N,Deamidation |
| 4063 | SDSARSKTL | 7,K,Ubiquitylation |
| 4075 | SLSKLGDVYVNDAFG | 2,L,Methylation; |
| | | 4,K,Ubiquitylation |
| 4080 | MSRYELKLAIPEGKQ | 6,L,Methylation; |
| | | 7,K,Ubiquitylation |
| 4095 | RLKYALTGDEVK | 3,K,Ubiquitylation |
| 4098 | RKTIVVNF | 2,K,Ubiquitylation |
| 4111 | QQAADKYLYVDKNFI | 6,K,Ubiquitylation |
| 4121 | TKPPSLQWAW | 2,K,Ubiquitylation |
| 4126 | TLGSGVTGAAKVA | 11,K,Ubiquitylation |
| 4131 | TGKSLLHLH | 3,K,Ubiquitylation |
| 4142 | LSAAKSKPIIA | 7,K,Ubiquitylation |
| 4148 | LTDITKGVQY | 6,K,Ubiquitylation |
| 4157 | LTELCKQKPADPL | 6,K,Ubiquitylation; |
| | | 8,K,Sumoylation |
| 4160 | SQVMREWEEAERQAK | 4,K,Ubiquitylation |
| 4183 | TAADTAAQISKR | 11,K,Ubiquitylation; |
| | | 12,R,Citrullination |
| 4184 | TAAPAVAETPDIKLF | 13,K,Ubiquitylation |
| 4185 | TAFQYIIDNKGIDSD | 10,K,Ubiquitylation; |
| | | 12,I,Methylation |
| 4211 | GTVRIGVAK | 9,K,Ubiquitylation |
| 4217 | HQPHKVTQYKKGKDS | 10,K,Dimethyl; |
| | | 11,K,Ubiquitylation; |
| | | 13,K,Dimethyl |
| 4231 | FVKVVKNKAYFKRYQ | 3,K,Ubiquitylation |
| 4242 | KKKEADAIKL | 3,K,Ubiquitylation; |
| | | 6,D,Methylation |
| 4246 | KKAKAPGLSSK | 4,K,Ubiquitylation; |
| | | 6,P,Oxidation |
| 4247 | KISSKNVQIK | 5,K,Ubiquitylation |
| 4255 | KLEKAKAKELATKLG | 1,K,Dimethyl; |
| | | 4,K,Ubiquitylation |
| 4257 | KMVDQLFCKK | 9,K,Ubiquitylation |
| 4265 | KGQKYFDSGDYNMAK | 3,Q,Methylation; |
| | | 4,K,Ubiquitylation |
| 4278 | KFIDTTSKF | 1,K,Ubiquitylation |
| 4354 | DDGKIVIFQSKPEIQ | 1,D,Methylation; |
| | | 4,K,Ubiquitylation |
| 4358 | DRTFQKWAAVVVPSG | 6,K,Ubiquitylation |
| 4788 | RLKNEGATVK | 3,K,Ubiquitylation |
| 4842 | AVGKPHGIAI | 4,K,Ubiquitylation |
| 4867 | RLLNINPNK | 4,N,Methylation; |
| | | 8,N,Methylation; |
| | | 9,K,Ubiquitylation |
| 4868 | KYRKVLQL | 3,R,Citrullination; |
| | | 4,K,Ubiquitylation; |
| | | 7,Q,Deamidation |
| 4879 | HFDLSHGSAQVKGH | 12,K,Ubiquitylation |
| 4889 | TGKQLALLK | 3,K,Ubiquitylation; |
| | | 5,L,Methylation |
| 4907 | RPWKKHSTF | 4,K,Ubiquitylation |
| 4917 | THVTKSLHSI | 5,K,Ubiquitylation |
| 4919 | AYKAIPVAQDLNAPS | 3,K,Ubiquitylation |
| 4935 | RLKVKGDLAM | 3,K,Ubiquitylation |
| 4936 | RLKVKGDLAM | 3,K,Ubiquitylation |
| 4945 | KPLPQPVF | 1,K,Ubiquitylation; |
| | | 5,Q,Deamidation |
| 4970 | QGPKQASGAAAA | 1,Q,Methylation; |
| | | 4,K,Ubiquitylation |
| 4972 | IEVDGKQVEL | 6,K,Ubiquitylation |
| 4984 | HVPGGGNVKIDSQKL | 14,K,Ubiquitylation |
| 5005 | HKPGGGDVKIESQKL | 14,K,Ubiquitylation |
| 5014 | TNVKAAWGKV | 9,K,Ubiquitylation |
| 5017 | RKGTDDSMTL | 2,K,Ubiquitylation |
| 5024 | TPKTPKGPSSVEDIK | 14,1,Methylation; |
| | | 15,K,Ubiquitylation |
| 5056 | SLKDEVLKIMPV | 2,L,Methylation; |
| | | 3,K,Ubiquitylation |
| 5065 | FKHIAKPGWK | 2,K,Ubiquitylation; |
| | | 6,K,Dimethyl |
| 5066 | SKSPDPYRL | 2,K,Ubiquitylation; |
| | | 3,S,Phosphorylation |
| 5095 | DVFRDPALKR | 9,K,Ubiquitylation |
| 5100 | SKAVVQVF | 2,K,Ubiquitylation |
| 5112 | SHEDPEVKF | 8,K,Ubiquitylation |
| 5129 | EGKATSTTEL | 1,E,Methylation; |
| | | 3,K,Ubiquitylation |
| 5130 | EGKFPSAA | 3,K,Ubiquitylation |
| 5132 | EGKLESLEL | 3,K,Ubiquitylation |
| 5134 | SQLHKENL | 5,K,Ubiquitylation; |
| | | 6,E,Methylation |
| 5135 | SQKDILEEKRAVPDR | 3,K,Ubiquitylation |
| 5140 | EGSEIVVAGRIADNK | 14,N,Methylation; |
| | | 15,K,Ubiquitylation |
| 5142 | KRNKQTYSTEPNNLK | 1,K,Dimethyl; |
| | | 2,R,Dimethyl; |
| | | 4,K,Ubiquitylation |
| 5157 | EPKFLDEPYEAIVPE | 3,K,Ubiquitylation |
| 5162 | EPTKSAPAPKKGSK | 10,K,Oxidation; |
| | | 11,P,Oxidation; |
| | | 14,K,Oxidation; |
| | | 4,K,Ubiquitylation; |
| | | 7,K,Oxidation |
| 5171 | TDLLLKLL | 6,K,Ubiquitylation |
| 5180 | DIAPTLTLYVGKKQL | 12,K,Sumoylation; |
| | | 13,K,Ubiquitylation |
| 5185 | DIKCVLNEGMPIYR | 3,K,Ubiquitylation |
| 5186 | SAQGSDVSLTACKV | 12,C,Oxidation; |
| | | 13,K,Ubiquitylation |
| 5193 | KRYKSIVKY | 4,K,Ubiquitylation |
| 5226 | SGDTTAPKKTSF | 9,K,Ubiquitylation |
| 5242 | KVIETQLAK | 1,K,Methylation; |
| | | 9,K,Ubiquitylation |
| 5277 | YLRGGAGVGSMTKIY | 13,K,Ubiquitylation |
| 5297 | KGDKCLLKY | 4,K,Ubiquitylation; |
| | | 5,C,Oxidation |
| 5311 | KSQGVGPIRKV | 1,K,Ubiquitylation; |
| | | 3,Q,Methylation |
| 5313 | KFIDTTSKF | 8,K,Ubiquitylation |
| 5318 | MSRYELKLAIPEGKQ | 3,R,Dimethyl; |
| | | 7,K,Ubiquitylation |
| 5351 | LVDVEPKVKSKKRE | 11,K,Dimethyl; |
| | | 12,K,Ubiquitylation; |
| | | 13,R,Dimethyl |
| 5360 | KGGKLNSAK | 4,K,Ubiquitylation |
| 5372 | KKIKDLPSL | 2,K,Ubiquitylation |
| 5374 | KKPALKKLTLLPAVV | 2,K,Ubiquitylation; |
| | | 6,K,Ubiquitylation; |
| | | 7,K,Acetylation |
| 5386 | YDGKDYIALNEDLRS | 2,D,Methylation; |
| | | 4,K,Ubiquitylation |
| 5462 | PRVLKQVH | 2,R,Citrullination; |
| | | 5,K,Ubiquitylation; |
| | | 6,Q,Deamidation |
| 5469 | LQKKLVPFATELHER | 2,Q,Deamidation; |
| | | 3,K,Ubiquitylation; |
| | | 4,K,Ubiquitylation |
| 5477 | LRPYPKEEVGQYLKK | 1,L,Methylation; |
| | | 6,K,Ubiquitylation |
| 5482 | LRKYGKKVQTEVLQK | 1,L,Methylation; |
| | | 3,K,Ubiquitylation |
| 5498 | PFGGASHAKGIVLEK | 14,E,Methylation; |
| | | 15,K,Ubiquitylation |
| 5504 | IPLYLKGGI | 6,K,Ubiquitylation |
| 5519 | PDYDALDVANKIGI | 11,K,Ubiquitylation; |
| | | 12,I,Methylation |
| 5582 | VFHTLGQYFQKL | 11,K,Ubiquitylation |
| 5585 | LNRKGGGNL | 2,N,Deamidation; |
| | | 4,K,Ubiquitylation; |
| | | 8,N,Deamidation |
| 6316 | KYRKVLQL | 3,R,Citrullination; |
| | | 4,K,Ubiquitylation |
| 6324 | KPLPQPVF | 1,K,Ubiquitylation |
| 6376 | PRVLKQVH | 2,R,Citrullination; |
| | | 5,K,Ubiquitylation |
| 6377 | LQKKLVPFATELHER | 3,K,Ubiquitylation; |
| | | 4,K,Ubiquitylation |
| 6390 | LNRKGGGNL | 4,K,Ubiquitylation |
| 6435 | TAAAPKAGP | 6,K,Ubiquitylation |
| 6440 | EGDKYKLSKKELKEL | 1,E,Methylation; |
| | | 3,D,Methylation; |
| | | 6,K,Ubiquitylation |
| 6498 | STPTLVEVSRNLGKV | 14,K,Ubiquitylation |
| 6499 | YRFQLQATTKEGPGE | 10,K,Ubiquitylation; |
| | | 15,E,Methylation |
| 6504 | DVQHFKVLR | 6,K,Ubiquitylation |
| 6512 | DSLDYAKKNEPKHRL | 12,K,Ubiquitylation; |
| | | 14,R,Methylation |
| 6518 | AAGKRSYVL | 4,K,Ubiquitylation |
| 6535 | YLKQLLSDKQQKRQS | 12,K,Ubiquitylation |
| 6545 | KSPREPGYKAEGK | 9,K,Ubiquitylation |
| 6554 | TPLPRSWSPKDKYNY | 12,P,Oxidation; |
| | | 9,K,Ubiquitylation |
| 6567 | ASKCPKCDKTVYF | 3,K,Ubiquitylation; |
| | | 6,K,Ubiquitylation; |
| | | 1,A,Acetylation |
| 6571 | TQIFKTNTQTYRES | 5,K,Ubiquitylation |
| 6598 | TNVDKLVK | 2,N,Deamidation; |
| | | 8,K,Ubiquitylation |
| 6614 | KTNLDFKVPNG | 10,K,Acetylation; |
| | | 1,N,Deamidation; |
| | | 3,K,Ubiquitylation; |
| | | 7,N,Deamidation |
| 6633 | TVIKAPTSFGYDKPH | 4,K,Ubiquitylation |
| 6641 | TRKPPAPK | 2,R,Methylation; |
| | | 3,K,Ubiquitylation |
| 6647 | ASGGIFVLK | 9,K,Ubiquitylation |
| 6672 | VKAQYEDIAQKSK | 11,K,Ubiquitylation; |
| | | 13,K,FAT10 |
| 6677 | TEAPLNPKA | 8,K,Ubiquitylation |
| 6708 | AEITDKLGL | 6,K,Ubiquitylation |
| 6711 | VYVKEPPVF | 4,K,Ubiquitylation |
| 6717 | VVDNGSGMCK | 8,K,Ubiquitylation |
| 6723 | TATKGLIR | 4,K,Ubiquitylation |
| 6728 | TIRTKVFVW | 3,R,Methylation; |
| | | 5,K,Ubiquitylation |
| 6731 | TIDSSLKSKSL | 7,K,Dimethyl; |
| | | 9,K,Ubiquitylation |
| 6732 | TICKEANVY | 3,C,Oxidation; |
| | | 4,K,Ubiquitylation |
| 6740 | ALALPPGALAK | 11,K,Ubiquitylation |
| 6750 | ALDGGNKHFL | 7,K,Ubiquitylation |
| 6762 | TGGNFKPSQ | 6,K,Ubiquitylation |
| 6785 | NSQKDILEEKRAVP | 10,K,Ubiquitylation; |
| | | 11,R,Citrullination |
| 6828 | KEDALDFKKDKGAFY | 11,K,Ubiquitylation; |
| | | 1,E,Methylation; |
| | | 2,D,Methylation; |
| | | 3,K,Ubiquitylation; |
| | | 8,K,Ubiquitylation; |
| | | 9,K,Ubiquitylation |
| 6851 | KCHKKMGF | 4,K,Acetylation; |
| | | 5,K,Ubiquitylation |
| 6852 | KCEAAKEAL | 3,E,Methylation; |
| | | 6,K,Ubiquitylation |
| 6855 | KAVKAPGAK | 4,K,Ubiquitylation |
| 6907 | QVENQIVK | 1,Q,Deamidation; |
| | | 5,Q,Deamidation; |
| | | 8,K,Ubiquitylation |
| 6909 | QVSLKVSNDGPTLIG | 5,K,Ubiquitylation |
| 6924 | IRAAKEAKKAKQASK | 1,1,Methylation; |
| | | 5,K,Ubiquitylation |
| 6925 | LDRLAYIAHPKL | 11,K,Ubiquitylation |
| 6928 | PLGFLKVPIW | 6,K,Ubiquitylation |
| 6930 | PLVRLGLTETLGK | 13,K,Ubiquitylation |
| 6938 | IFDYDYDGLHDTEDK | 11,D,Methylation; |
| | | 15,D,Methylation; |
| | | 5,D,Methylation; |
| | | 7,K,Ubiquitylation |
| 6939 | QGPKGGSGSGPTIEE | 1,Q,Methylation; |
| | | 4,K,Ubiquitylation |
| 6946 | IKEVKEAKAKAKKES | 13,K,Ubiquitylation; |
| | | 14,K,Ubiquitylation; |
| | | 2,E,Methylation; |
| | | 5,K,Ubiquitylation; |
| | | 6,E,Methylation |
| 6951 | IIKFPLTTESAMKK | 1,I,Methylation; |
| | | 3,K,Ubiquitylation |
| 6974 | LTVTDLLGKCLLSPV | 10,K,Ubiquitylation; |
| | | 9,C,Oxidation |
| 6980 | MKHATKTAKDALSSV | 10,K,Ubiquitylation; |
| | | 9,D,Methylation |
| 6982 | MKLNISFPATGCQKL | 1,K,Ubiquitylation |
| 7015 | LSKVVNIVPVIAK | 1,L,Methylation; |
| | | 3,K,Ubiquitylation |
| 7034 | KKQQRKPLR | 5,R,Methylation; |
| | | 6,K,Ubiquitylation |
| 7083 | KGGGDILKSL | 5,D,Methylation; |
| | | 8,K,Ubiquitylation |
| 7086 | KKPKKAAGGATPK | 4,K,Dimethyl; |
| | | 5,K,Ubiquitylation |
| 7088 | LKAKKAVLKGVHSHK | L,L,Methylation; |
| | | 2,K,Ubiquitylation |
| 7098 | LKEAPEGWQTPK | 1,L,Methylation; |
| | | 2,K,Ubiquitylation |
| 7136 | SGPYGGGGQYFAKPQ | 13,K,Ubiquitylation |
| 7163 | SHEDPEVKF | 8,K,Ubiquitylation |
| 7176 | GFRTHFGGGKTTGF | 10,K,Ubiquitylation |
| 7184 | SAAKILADATAKMVE | 12,K,Ubiquitylation; |
| | | 15,E,Methylation |
| 7215 | SPKKAKAAA | 4,K,Dimethyl; |
| | | 6,K,Ubiquitylation |
| 7236 | EGKVATTVI | 3,K,Ubiquitylation |
| 7240 | SPTPQKTSAKSPGP | 10,P,Oxidation; |
| | | 12,K,Ubiquitylation; |
| | | 4,P,Oxidation |
| 7247 | SNRHGLIRKY | 9,K,Ubiquitylation |
| 7261 | SKNAVIRII | 2,K,Ubiquitylation |
| 7273 | EVEGLEANEGSKTL | 12,K,Ubiquitylation; |
| | | 14,L,Methylation |
| 7286 | KVNVFRKSRRQRK | 10,R,Citrullination; |
| | | 6,K,Ubiquitylation; |
| | | 7,R,Citrullination; |
| | | 9,R,Citrullination |
| 7299 | GHQQLYWSHPRKF | 12,K,Ubiquitylation; |
| | | 1,G,Acetylation |
| 7304 | HFELGGDKKRK | 9,K,Ubiquitylation |
| 7305 | HFDLSHGSAQVKGHG | 10,Q,Methylation; |
| | | 12,K,Ubiquitylation |
| 7310 | HGSAQVKGHGKKVAD | 12,K,Ubiquitylation; |
| | | 15,D,Methylation |
| 7312 | KYSKLLSM | 1,K,Ubiquitylation |
| 7315 | RLKGPLLNKF | 3,K,Ubiquitylation |
| 7338 | RKYVSQKK | 7,K,Ubiquitylation |
| 7339 | RKTVTAMDVVYALK | 1,R,Citrullination; |
| | | 2,K,Ubiquitylation |
| 7345 | HLVDGKSPR | 6,K,Ubiquitylation |
| 7357 | RKTGQAPGY | 2,K,Ubiquitylation |
| 7363 | RKEQKHIM | 2,K,Ubiquitylation |
| 7365 | RKKTATAV | 2,K,Ubiquitylation |
| 7367 | RKLGSHSV | 2,K,Ubiquitylation |
| 7377 | HLEDLIRK | 8,K,Ubiquitylation |
| 7379 | RTKAVGTITK | 3,K,Ubiquitylation |
| 7380 | RTKVHLPGHK | 10,L,Methylation; |
| | | 6,K,Ubiquitylation |
| 7445 | RSASPKRR | 6,K,Ubiquitylation; |
| | | 7,R,Citrullination |
| 8154 | TNVDKLVK | 8,K,Ubiquitylation |
| 8157 | KTNLDFKVPNG | 10,K,Acetylation; |
| | | 3,K,Ubiquitylation |
| 8196 | QVFNQIVK | 8,K,Ubiquitylation |
| 8279 | KKALLLYK | 2,K,Ubiquitylation |
| 8285 | NPEPKFGGKY | 2,P,Oxidation; |
| | | 4,P,Oxidation; |
| | | 5,K,Ubiquitylation |
| 8286 | SFEAQGALANIAVDK | 14,D,Methylation; |
| | | 15,K,Ubiquitylation |
| 8317 | GKRIQYQLVDISQDN | 2,K,Ubiquitylation; |
| | | 3,R,Citrullination |
| 8372 | TAYRVSKQAQLSAPT | 4,R,Citrullination; |
| | | 7,K,Ubiquitylation |
| 8381 | FSASYKTLPRGTAKE | 14,K,Ubiquitylation |
| 8385 | DVKGIKVQSVDKQYN | 12,K,Ubiquitylation; |
| | | 15,N,Deamidation |
| 8406 | DVKGIKVQSVDKQYN | 12,K,Ubiquitylation |
| 8407 | HEAVTIKCTF | 7,K,Ubiquitylation; |
| | | 8,C,Cysteinylation |
| 8408 | TKEICVVR | 2,K,Ubiquitylation |
| 8420 | TGDAYVILKTVQLRN | 9,K,Ubiquitylation |
| 8427 | HSKIIIIKKGHAKDS | 13,K,Ubiquitylation; |
| | | 14,D,Methylation |
| 8450 | STDNFNCKY | 7,C,Cysteinylation; |
| | | 8,K,Ubiquitylation |
| 8451 | STDVKGCSMY | 5,K,Ubiquitylation |
| 8481 | SERKMDPAEEDTNVY | 3,R,Citrullination; |
| | | 4,K,Ubiquitylation |
| 8487 | YPNFKDIRY | 3,N,Methylation; |
| | | 5,K,Ubiquitylation |
| 8492 | KKINNLNK | 2,K,Ubiquitylation; |
| | | 4,N,Methylation; |
| | | 5,N,Metbylation; |
| | | 7,N,Methylation |
| 8494 | YARFNKIKKLTAKDF | 3,R,Dimethyl; |
| | | 6,K,Dimethyl; |
| | | 8,K,Ubiquitylation |
| 8495 | KKFACNGTVIEH | 1,K,Ubiquitylation; |
| | | 2,K,Ubiquitylation |
| 8506 | LRPYPKEEVGQYLKK | 2,R,Methylation; |
| | | 6,K,Ubiquitylation |
| 8571 | HEAVTIKCTF | 7,K,Ubiquitylation |
| 8575 | STDNFNCKY | 8,K,Ubiquitylation |
| 8596 | KTADGKCAYR | 6,K,Ubiquitylation |
| 8604 | DTKIILETKSKTIYK | 3,K,Ubiquitylation |
| 8617 | TTKTADGKCAYR | 8,K,Ubiquitylation |
| 8624 | TYGKIWEGSSK | 4,K,Ubiquitylation |
| 8628 | TELGKLPAGGVLY | 3,L,Methylation; |
| | | 5,K,Ubiquitylation |
| 8631 | VVYVIDSCK | 8,C,Cysteinylation; |
| | | 9,K,Ubiquitylation |
| 8634 | KVFSGKSER | 1,K,Ubiquitylation |
| 8637 | KVFGGTVHKK | 9,K,Ubiquitylation |
| 8641 | VLCPPPVKK | 9,K,Ubiquitylation |
| 8642 | TKHKTILEAR | 2,K,Ubiquitylation |
| 8649 | KAFQATQQK | 1,K,Ubiquitylation |
| 8652 | PEKDIEFIYTAPSSA | 3,K,Ubiquitylation |
| 8668 | PRKVVGQQDL | 3,K,Ubiquitylation |
| 8670 | QAVLHMEQRKQQQQQ | 10,Q,Methylation; |
| | | 8,K,Ubiquitylation |
| 8690 | KHFELGGDKKRK | 11,R,Methylation; |
| | | 12,K,Ubiquitylation |
| 8693 | KGDKAFLCR | 4,K,Ubiquitylation; |
| | | 8,C,Cysteinylation |
| 8694 | KGKNIKIISKIENHE | 10,K,Ubiquitylation |
| 8704 | SKASKSSKGKD | 2,K,Sumoylation; |
| | | 8,K,Ubiquitylation |
| 8739 | RPKDYEVDATLKSLN | 12,K,Ubiquitylation; |
| | | 3,K,Oxidation |
| 8881 | VVYVIDSCK | 9,K,Ubiquitylation |
| 8885 | KGDKAFLCR | 4,K,Ubiquitylation |
| 8945 | YPFKPPKV | 4,K,Ubiquitylation |
| 8955 | SLKYPDENGFDAFLK | 3,K,Ubiquitylation |
| 8989 | ITGKPGVP | 4,K,Ubiquitylation |
| 9012 | KGEKVPKGK | 7,K,Ubiquitylation |
| 9019 | YPFKPPKV | 4,K,Ubiquitylation |
| 9067 | QKSYKVSTSGPRAFS | 2,K,Ubiquitylation; |
| | | 5,K,Sumoylation |
| 9069 | GKVTKSAQKAQKAK | 2,K,Ubiquitylation |
| 9070 | FINIPVLDIK | 10,N,Deamidation; |
| | | 3,K,Ubiquitylation |
| 9071 | FINIPVLDIK | 3,K,Ubiquitylation |
| 9082 | KPEPPAMPQPVPTA | 1,K,Ubiquitylation |
| 9093 | FPDKPITQY | 4,K,Ubiquitylation |
| 9114 | TKGGDAPAAGEDA | 2,K,Ubiquitylation |
| 9126 | TPKIQVYSRHPAENG | 3,K,Ubiquitylation; |
| | | 4,I,Methylation |
| 9147 | VHKAVLTIDEKGTEA | 11,K,Ubiquitylation; |
| | | 14,E,Methylation |
| 9170 | QGQKKVEELEGEITT | 1,Q,Methylation; |
| | | 4,K,Ubiquitylation |
| 9192 | KVFSGKSER | 1,K,Ubiquitylation |
| 9202 | LANIAVDKANLEIMT | 7,D,Methylation; |
| | | 8,K,Ubiquitylation |
| 9222 | SNLRKAFEEAEKNAP | 12,K,Ubiquitylation; |
| | | 13,N,Methylation |
| 9252 | ALADAKALV | 4,D,Methylation; |
| | | 6,K,Ubiquitylation |
| 9256 | EEIAFLKKL | 8,K,Ubiquitylation |
| 9319 | VDRYISKYELDKAFS | 7,K,Ubiquitylation |
| 9331 | PKVLANHLL | 2,K,Ubiquitylation |
| 9366 | LYAEKVATR | 5,K,Ubiquitylation; |
| | | 9,R,Citrullination |
| 9368 | TNKVASQKGMSVY | 3,K,Ubiquitylation |
| 9378 | AVHKAVLTIDEKGTE | 11,E,Methylation; |
| | | 12,K,Ubiquitylation; |
| | | 15,E,Methylation |
| 9438 | SQKPVMVKR | 8,K,Ubiquitylation |
| 9447 | KPLATKAAR | I,K,Ubiquitylation; |
| | | 2,P,Oxidation |
| 9454 | EAVYCKFHYK | 5,C,Cysteinylation; |
| | | 6,K,Ubiquitylation |
| 9455 | EAVYCKFHYK | 6,K,Ubiquitylation |
| 9465 | VDLLKLSV | 2,D,Methylation; |
| | | 5,K,Ubiquitylation |
| 9472 | RPKDYEVDATLKSLN | 12,K,Ubiquitylation |
| 9479 | VHKAVLTIDEKGTEA | 11,K,Ubiquitylation; |
| | | 14,E,Methylation |
| 9506 | KABAKAKAL | 3,E,Methylation; |
| | | 5,K,Ubiquitylation |
| 9512 | KINLLKRSL | 3,N,Deamidation; |
| | | 6,K,Ubiquitylation |
| 9514 | KINLLKRSL | 6,K,Ubiquitylation |
| 9520 | KESTLHLVL | 1,K,Ubiquitylation |
| 9555 | FIDLLHDK | 6,H,Methylation; |
| | | 8,K,Ubiquitylation |
| 9560 | AQLGGPEAAKSDETA | 10,K,Ubiquitylation; |
| | | 12,D,Methylation |
| 9569 | KRTKKVGIVGKY | 1,K,Ubiquitylation; |
| | | 2,R,Methylation |
| 9589 | TKGGDAPAAGEDA | 2,K,Ubiquitylation |
| 9608 | TPKIQVYSRHPAEN | 3,K,Ubiquitylation; |
| | | 4,1,Methylation |
| 9643 | AGKVTKSAQKAQKAK | 3,K,Ubiquitylation |
| 9650 | REAKKQGP | 5,K,Ubiquitylation |
| 9740 | FLLARKATIQK | 2,L,Methylation; |
| | | 6,K,Ubiquitylation |
| 9776 | VPPVQVSPLIKL | 11,K,Ubiquitylation |
| 9787 | GHQQLYWSHPRKF | 12,K,Ubiquitylation |
| 9792 | KVKVGVNGFG | 1,K,Ubiquitylation |
| 9798 | SILSLVTKI | 8,K,Ubiquitylation |
| 9799 | KVPKLLIY | 4,K,Ubiquitylation |
| 9804 | VETRPAGDGTFQKWA | 12,Q,Methylation; |
| | | 13,K,Ubiquitylation |
| 9836 | NKNISAIIQGIGKDK | 2,K,Ubiquitylation |
| 9894 | EESEKLSKMSSLLE | 10,K,Ubiquitylation; |
| | | 5,S,Phosphorylation; |
| | | 7,K,Ubiquitylation; |
| | | 8,S,Phosphorylation |
| 9952 | TKDVPITSV | 2,K,Ubiquitylation |
| 9995 | FVKEFSHIAFLTIKG | 13,I,Methylation; |
| | | 14,K,Ubiquitylation |
| 10022 | KGQKYFDSGDYNMAK | 1,K,Methylation; |
| | | 4,K,Ubiquitylation |
| 10033 | DKPDMAEIEKFDKSK | 1,D,Methylation; |
| | | 2,K,Ubiquitylation |
| 10038 | VLCPPPVKKR | 9,K,Ubiquitylation |
| 10061 | VLCPPPVKKR | 8,K,Ubiquitylation; |
| | | 9,K,Ubiquitylation |
| 10077 | AVYLSTCKDSK | 8,K,Ubiquitylation |
| 10083 | TGKTLIGK | 3,K,Ubiquitylation |
| 10096 | KKILKVMKK | 2,K,Ubiquitylation; |
| | | 4,L,Methylation; |
| | | 5,K,Ubiquitylation |
| 10106 | HVSGGLLK | 8,K,Ubiquitylation |
| 10157 | KGPPKALAYK | 5,K,Ubiquitylation |
| 10182 | HPKYKTEL | 3,K,Ubiquitylation |
| 10214 | SQVMREWEEAERQAK | 15,K,Ubiquitylation |
| 10235 | HKAVLTIDEKGTEAA | 10,K,Ubiquitylation |
| 10355 | HTDILKEKY | 8,K,Ubiquitylation |
| 10424 | TDKTPALISDY | 3,K,Ubiquitylation |
| 10433 | KRKIVLDPSGSMN | 2,R,Methylation; |
| | | 3,K,Ubiquitylation |
| 10509 | TDQQKLIY | 3,Q,Deamidation; |
| | | 4,Q,Deamidation; |
| | | 5,K,Ubiquitylation |
| 10547 | TDQQKLIY | 5,K,Ubiquitylation |
| 10574 | GSSSPLRK | 8,K,Ubiquitylation |
| 10617 | KTDGKKSY | 5,K,Ubiquitylation |
| 10633 | QHEKKYDI | 4,K,Ubiquitylation; |
| | | 5,K,Acetylation |
| 10637 | TKLPNSVLGR | 2,K,Ubiquitylation |
| 10646 | HTDILKEKY | 8,K,Ubiquitylation |
| 10826 | AK(GG)AETIQAL | 2,K,Ubiquitylation |

[0158] The agents of some embodiments of the invention are capable of specifically binding the peptide when is presented by (or bound to) an MHC molecule.

[0159] As used herein, the phrase “major histocompatibility complex (MHC)” refers to a complex of antigens encoded by a group of linked loci that plays a role in control of the cellular interactions responsible for physiologic immune responses, which are collectively termed H-2 in the mouse and “human leukocyte antigen (HLA)” in humans. The two principal classes of the MHC antigens, class I and class II, each comprise a set of cell surface glycoproteins which play a role in determining tissue type and transplant compatibility.

[0160] According to a specific embodiment, the MHC is a human MHC (i.e. HLA).

[0161] According to a specific embodiment, the MHC is a MHC class I.

[0162] According to a specific embodiment, the MHC is HLA class I.

[0163] MHC class I molecules are expressed on the surface of nearly all cells. These molecules function in presenting peptides which are mainly derived from endogenously synthesized proteins to CD8+ T cells via an interaction with the αβ T-cell receptor. The class I MHC molecule is a heterodimer composed of a 46-kDa heavy chain which is non-covalently associated with the 12-kDa light chain β-2 microglobulin. In humans, there are several MHC haplotypes, such as, for example, HLA-A2, HLA-A1, HLA-A3. HLA-A24, HLA-A26, HLA-A28, HLA-A31, HLA-A33, HLA-A34, HLA-A0201, HLA-A6802, HLA-A3101, HLA-B7, HLA-B27, HLA-B45, HLA-B5401, HLA-B5101, HLA-B4402, HLA-B4403 and HLA-Cw8, their sequences can be found for example at the kabbat data base, at htexttransferprotocol://immuno.bme.nwu.edu. Further information concerning MHC haplotypes can be found in Paul, B. Fundamental Immunology Lippincott-Rven Press.

[0164] According to specific embodiments, the MHC haplotype comprises a haplotype selected from the group consisting of HLA-A0201, HLA-B5401, HLA-B5101, HLA-A6802. HLA-B4402, HLA-B4403 and HLA-A3101.

[0165] According to other specific embodiments, the MHC is a MHC class II.

[0166] According to a specific embodiment, the MHC is HLA class II. According to specific embodiments, the agent binds the modified or the un-modified peptide in an MHC-restricted manner (i.e. does not bind the MHC in an absence of the peptide, and does not bind the peptide in an absence of the MHC).

[0167] According to a specific embodiment, the agent is capable of binding the MHC presented modified or un-modified peptide when naturally presented on cells.

[0168] As used herein, the term “specifically binding an MHC presented peptide comprising a PTM” refers to the ability to bind the modified peptide and not a peptide having the same amino acid sequence as said peptide that does not comprise the modification, which may be manifested as higher affinity (e.g., K_{d}) to the modified peptide as compared to the non-modified peptide.

[0169] According to specific embodiments, the agent is capable of binding the modified peptide and not a peptide having a different amino acid sequence or a peptide having a different modification, which may be manifested as higher affinity (e.g., K_{d}) to the modified peptide as compared to other peptides.

[0170] As used herein, the term “specifically binding an MHC presented peptide” refers to the ability to bind the peptide and not a peptide having a different amino acid sequence, which may be manifested as higher affinity (e.g., K_{d}) to the peptide as compared to other peptides.

[0171] Higher affinity can be, for examples, of at least 5, 10, 100, 1000 or 10000 fold.

[0172] Methods of determining binding of the agent to the peptide are well known in the art and include BiaCore, HPLC, Surface Plasmon Resonance assay (SPR) and flow cytometry.

[0173] According to specific embodiments, the agent binds the MHC presented peptide with an affinity higher than 10⁻⁶ M.

[0174] According to specific embodiments, the agent binds the MHC presented peptide with an affinity higher than about, 10⁻⁹ M, 10⁻¹⁰ M and as such is stable under physiological (e.g., in vivo) conditions.

[0175] According to a specific embodiment the affinity is between 0.1-10⁻⁹ M or 1-10×10⁻⁹ M or 0.1-10×10⁻⁹ M. According to specific embodiments affinity is of at least 100 nM, 50 nM, 10 nM, 1 nM or higher.

[0176] Non-limiting examples of agents capable of binding the MHC presented modified or un-modified peptides include, but are not limited to, antibodies, immune cells e.g. T cells NK cells, CAR-T cells, CAR-NK cells, PROTACS, small molecules, chemicals, toxins and drugs.

[0177] Thus, according to specific embodiments, the agent is an antibody.

[0178] The term “antibody” as used in this invention includes intact molecules as well as functional fragments thereof (such as Fab. F(ab′)2, Fv, scFv, dsFv, or single domain molecules such as VH and VL) that are capable of binding to an epitope of an antigen. According to specific embodiments, the antibodies of some embodiments of the present invention bind the peptide in an MHC restricted manner. These antibodies are referred to as T cell receptor like antibodies.

[0179] According to specific embodiments, the antibody is a whole or intact antibody.

[0180] According to specific embodiments, the antibody is an antibody fragment.

[0181] According to specific embodiments, the antibody comprises an Fc domain.

[0182] Suitable antibody fragments for practicing some embodiments of the invention include a complementarity-determining region (CDR) of an immunoglobulin light chain (referred to herein as “light chain”), a complementarity-determining region of an immunoglobulin heavy chain (referred to herein as “heavy chain”), a variable region of a light chain, a variable region of a heavy chain, a light chain, a heavy chain, an Fd fragment, and antibody fragments comprising essentially whole variable regions of both light and heavy chains such as an Fv, a single chain Fv Fv (scFv), a disulfide-stabilized Fv (dsFv), an Fab, an Fab′, and an F(ab′)2.

[0183] As used herein, the terms “complementarity-determining region” or “CDR” are used interchangeably to refer to the antigen binding regions found within the variable region of the heavy and light chain polypeptides. Generally, antibodies comprise three CDRs in each of the VH (CDR HI or HI; CDR H2 or H2; and CDR H3 or H3) and three in each of the VL (CDR LI or LI; CDR L2 or L2; and CDR L3 or L3).

[0184] The identity of the amino acid residues in a particular antibody that make up a variable region or a CDR can be determined using methods well known in the art and include methods such as sequence variability as defined by Kabat et al. (See, e.g., Kabat et al., 1992. Sequences of Proteins of Immunological Interest, 5th ed., Public Health Service. NIH. Washington D.C.), location of the structural loop regions as defined by Chothia et al. (see, e.g., Chothia et al., Nature 342:877-883, 1989.), a compromise between Kabat and Chothia using Oxford Molecular's AbM antibody modeling software (now Accelrys®, see, Martin et al., 1989. Proc. Natl Acad Sci USA. 86:9268; and world wide web site www(dot)bioinf-org(dot)uk/abs), available complex crystal structures as defined by the contact definition (see MacCallum et al., J. Mol. Biol. 262:732-745, 1996) and the “conformational definition” (see, e.g., Makabe et al., Journal of Biological Chemistry, 283:1156-1166, 2008).

[0185] As used herein, the “variable regions” and “CDRs” may refer to variable regions and CDRs defined by any approach known in the art, including combinations of approaches.

[0186] Functional antibody fragments comprising whole or essentially whole variable regions of both light and heavy chains are defined as follows:
[0187] (i) Fv, defined as a genetically engineered fragment consisting of the variable region of the light chain (VL) and the variable region of the heavy chain (VH) expressed as two chains;
[0188] (ii) single chain Fv (“scFv”), a genetically engineered single chain molecule including the variable region of the light chain and the variable region of the heavy chain, linked by a suitable polypeptide linker as a genetically fused single chain molecule.
[0189] (iii) disulfide-stabilized Fv (“dsFv”), a genetically engineered antibody including the variable region of the light chain and the variable region of the heavy chain, linked by a genetically engineered disulfide bond.
[0190] (iv) Fab, a fragment of an antibody molecule containing a monovalent antigen-binding portion of an antibody molecule which can be obtained by treating whole antibody with the enzyme papain to yield the intact light chain and the Fd fragment of the heavy chain which consists of the variable and CH1 domains thereof;
[0191] (v) Fab′, a fragment of an antibody molecule containing a monovalent antigen-binding portion of an antibody molecule which can be obtained by treating whole antibody with the enzyme pepsin, followed by reduction (two Fab′ fragments are obtained per antibody molecule);
[0192] (vi) F(ab′)2, a fragment of an antibody molecule containing a monovalent antigen-binding portion of an antibody molecule which can be obtained by treating whole antibody with the enzyme pepsin (i.e., a dimer of Fab′ fragments held together by two disulfide bonds); and
[0193] (vii) Single domain antibodies or nanobodies are composed of a single VH or VL domains which exhibit sufficient affinity to the antigen.

[0194] According to specific embodiments the antibody heavy chain constant region is chosen from, e.g., IgG1, IgG2, IgG3, IgG4, IgM, IgA1, IgA2, IgD, and IgE.

[0195] According to a specific embodiment the antibody isotype is IgG1 or IgG4.

[0196] The choice of antibody type will depend on the immune effector function that the antibody is designed to elicit.

[0197] The antibody may be monoclonal or polyclonal.

[0198] Methods of producing polyclonal and monoclonal antibodies as well as fragments thereof are well known in the art (See for example, Harlow and Lane. Antibodies: A Laboratory Manual, Cold Spring Harbor Laboratory, New York, 1988, incorporated herein by reference).

[0199] Antibody fragments according to some embodiments of the invention can be prepared by proteolytic hydrolysis of the antibody or by expression in E. coli or mammalian cells (e.g. Chinese hamster ovary cell culture or other protein expression systems) of DNA encoding the fragment. Antibody fragments can be obtained by pepsin or papain digestion of whole antibodies by conventional methods. For example, antibody fragments can be produced by enzymatic cleavage of antibodies with pepsin to provide a 5S fragment denoted F(ab′)2. This fragment can be further cleaved using a thiol reducing agent, and optionally a blocking group for the sulfhydryl groups resulting from cleavage of disulfide linkages, to produce 3.5S Fab′ monovalent fragments. Alternatively, an enzymatic cleavage using pepsin produces two monovalent Fab′ fragments and an Fc fragment directly. These methods are described, for example, by Goldenberg. U.S. Pat. Nos. 4,036,945 and 4,331,647, and references contained therein, which patents are hereby incorporated by reference in their entirety. See also Porter, R. R. [Biochem. J. 73: 119-126 (1959)]. Other methods of cleaving antibodies, such as separation of heavy chains to form monovalent light-heavy chain fragments, further cleavage of fragments, or other enzymatic, chemical, or genetic techniques may also be used, so long as the fragments bind to the antigen that is recognized by the intact antibody.

[0200] Fv fragments comprise an association of VH and VL chains. This association may be noncovalent, as described in Inbar et al. [Proc. Nat'l Acad. Sci. USA 69:2659-62 (19720]. Alternatively, the variable chains can be linked by an intermolecular disulfide bond or cross-linked by chemicals such as glutaraldehyde. Preferably, the Fv fragments comprise VH and VL chains connected by a peptide linker. These single-chain antigen binding proteins (sFv) are prepared by constructing a structural gene comprising DNA sequences encoding the VH and VL domains connected by an oligonucleotide. The structural gene is inserted into an expression vector, which is subsequently introduced into a host cell such as E. coli. The recombinant host cells synthesize a single polypeptide chain with a linker peptide bridging the two V domains. Methods for producing sFvs are described, for example, by [Whitlow and Filpula, Methods 2: 97-105 (1991); Bird et al., Science 242:423-426 (1988); Pack et al., Bio/Technology 11:1271-77 (1993); and U.S. Pat. No. 4,946,778, which is hereby incorporated by reference in its entirety.

[0201] Another form of an antibody fragment is a peptide coding for a single complementarity-determining region (CDR). CDR peptides (“minimal recognition units”) can be obtained by constructing genes encoding the CDR of an antibody of interest. Such genes are prepared, for example, by using the polymerase chain reaction to synthesize the variable region from RNA of antibody-producing cells. See, for example, Larrick and Fry [Methods, 2: 106-10 (1991)].

[0202] Humanized forms of non-human (e.g., murine) antibodies are chimeric molecules of immunoglobulins, immunoglobulin chains or fragments thereof (such as Fv, Fab, Fab′, F(ab′).sub.2 or other antigen-binding subsequences of antibodies) which contain minimal sequence derived from non-human immunoglobulin. Humanized antibodies include human immunoglobulins (recipient antibody) in which residues form a complementary determining region (CDR) of the recipient are replaced by residues from a CDR of a non-human species (donor antibody) such as mouse, rat or rabbit having the desired specificity, affinity and capacity. In some instances, Fv framework residues of the human immunoglobulin are replaced by corresponding non-human residues. Humanized antibodies may also comprise residues which are found neither in the recipient antibody nor in the imported CDR or framework sequences. In general, the humanized antibody will comprise substantially all of at least one, and typically two, variable domains, in which all or substantially all of the CDR regions correspond to those of a non-human immunoglobulin and all or substantially all of the FR regions are those of a human immunoglobulin consensus sequence. The humanized antibody optimally also will comprise at least a portion of an immunoglobulin constant region (Fc), typically that of a human immunoglobulin [Jones et al., Nature, 321:522-525 (1986); Riechmann et al., Nature, 332:323-329 (1988); and Presta, Curr. Op. Struct. Biol., 2:593-596 (1992)].

[0203] Methods for humanizing non-human antibodies are well known in the art. Generally, a humanized antibody has one or more amino acid residues introduced into it from a source which is non-human. These non-human amino acid residues are often referred to as import residues, which are typically taken from an import variable domain. Humanization can be essentially performed following the method of Winter and co-workers [Jones et al., Nature, 321:522-525 (1986); Riechmann et al., Nature 332:323-327 (1988); Verhoeyen et al., Science, 239:1534-1536 (1988)], by substituting rodent CDRs or CDR sequences for the corresponding sequences of a human antibody. Accordingly, such humanized antibodies are chimeric antibodies (U.S. Pat. No. 4,816,567), wherein substantially less than an intact human variable domain has been substituted by the corresponding sequence from a non-human species. In practice, humanized antibodies are typically human antibodies in which some CDR residues and possibly some FR residues are substituted by residues from analogous sites in rodent antibodies.

[0204] Human antibodies can also be produced using various techniques known in the art, including phage display libraries [Hoogenboom and Winter, J. Mol. Biol., 227:381 (1991); Marks et al., J. Mol. Biol., 222:581 (1991)]. The techniques of Cole et al, and Boerner et al, are also available for the preparation of human monoclonal antibodies (Cole et al., Monoclonal Antibodies and Cancer Therapy. Alan R. Liss, p. 77 (1985) and Boerner et al., J. Immunol., 147(1):86-95 (1991)]. Similarly, human antibodies can be made by introduction of human immunoglobulin loci into transgenic animals, e.g., mice in which the endogenous immunoglobulin genes have been partially or completely inactivated. Upon challenge, human antibody production is observed, which closely resembles that seen in humans in all respects, including gene rearrangement, assembly, and antibody repertoire. This approach is described, for example, in U.S. Pat. Nos. 5,545,807; 5,545,806; 5,569,825; 5,625,126; 5,633,425; 5,661,016, and in the following scientific publications: Marks et al., Bio/Technology 10,: 779-783 (1992); Lonberg et al., Nature 368: 856-859 (1994); Morrison, Nature 368 812-13 (1994); Fishwild et al., Nature Biotechnology 14, 845-51 (1996); Neuberger, Nature Biotechnology 14: 826 (1996); and Lonberg and Huszar, Intern. Rev. Immunol. 13, 65-93 (1995).

[0205] Once antibodies are obtained, they may be tested for activity, for example via ELISA.

[0206] The antibody may be soluble or non-soluble.

[0207] Non-soluble antibodies may be a part of a particle (synthetic or non-synthetic) or a cell.

[0208] According to other specific embodiments, the agent is a T cell receptor (TCR) or a chimeric antigen receptor (CAR).

[0209] As used herein the phrase “T cell receptor (TCR)” refers to variable α- and β-chains from T cells with specificity against a specific peptide presented in the context of MHC.

[0210] According to specific embodiments, the agent is not a naturally occurring TCR.

[0211] As used herein the phrase “chimeric antigen receptor (CAR)” refers to a recombinant or synthetic molecule which combines antibody-based specificity for a desired peptide with a T cell receptor-activating intracellular domain to generate a chimeric protein that exhibits cellular immune activity to the specific antigen.

[0212] According to other specific embodiments, the agent comprises a therapeutic moiety.

[0213] The therapeutic moiety can be proteinaceous or non-proteinaceous.

[0214] The Therapeutic moiety may be any molecule, including small molecule chemical compounds and polypeptides.

[0215] According to specific embodiments, the therapeutic moiety is capable of eliciting an immune response to a cell presenting the peptide upon binding of the agent.

[0216] As used herein, the phrase “eliciting an immune response” refers to stimulation of an immune cell (e.g. T cell, dendritic cell, NK cell, B cell) that results in cellular proliferation, maturation, cytokine production and/or induction of regulatory or effector functions.

[0217] According to specific embodiments, the immune response comprises a T cell response.

[0218] According to specific embodiments, the immune response comprises a dendritic cell response.

[0219] According to specific embodiments, the immune response is specific to a cell expressing the modified peptide with no cross reactivity with a cell not expressing the modified peptide.

[0220] According to specific embodiments, the immune response is specific to a cell expressing the un-modified peptide with no cross reactivity with a cell not expressing the un-modified peptide.

[0221] Methods of evaluating immune cell activation or function are well known in the art and include, but are not limited to, proliferation assays such as BRDU and thymidine incorporation, cytotoxicity assays such as chromium release, cytokine secretion assays such as intracellular cytokine staining ELISPOT and ELISA, expression of activation markers such as CD25, CD69 and CD69 using flow cytometry and multimer (e.g. tetramer) assays.

[0222] The therapeutic moiety can be an integral part of the agent e.g., in the case of a whole antibody, the Fc domain, which activates antibody-dependent cell-mediated cytotoxicity (ADCC). ADCC is a mechanism of cell-mediated immune defense whereby an effector cell of the immune system actively lyses a target cell, whose membrane-surface antigens have been bound by specific antibodies. It is one of the mechanisms through which antibodies, as part of the humoral immune response, can act to limit and contain infection. Classical ADCC is mediated by natural killer (NK) cells; macrophages, neutrophils and eosinophils can also mediate ADCC. For example, eosinophils can kill certain parasitic worms known as helminths through ADCC mediated by IgE. ADCC is part of the adaptive immune response due to its dependence on a prior antibody response.

[0223] Alternatively or additionally, the agent may be a bispecific antibody (see e.g., Withoff, S., Helfrich. W., de Leij, L F., Molema, G. (2001) Curr Opin Mol Tier. 3,:53-62) in which the therapeutic moiety is a T cell engager for example, such as an anti CD3 antibody or an anti CD16a; alternatively the therapeutic moiety may be an anti-immune checkpoint molecule (anti PD-1).

[0224] Alternatively or additionally, according to specific embodiments, the therapeutic moiety is an immune cell expressing the agent. Non-limiting examples of immune cells that can be used with specific embodiments of the invention include T cells. NK cells. NKT cells. B cells, macrophages, dendritic cells (DCs) and granulocytes.

[0225] According to specific embodiments, the immune cell is a T cell.

[0226] Thus, according to specific embodiments, the agent is a T cell receptor (TCR) or a chimeric antigen receptor (CAR) and the therapeutic moiety is a T cell transduced with the agent.

[0227] Method of transducing with a TCR are known in the art and are disclosed e.g. in Nicholson et al. Adv Hematol. 2012; 2012:404081; Wang and Rivière Cancer Gene Ther. 2015 March; 22(2):85-94); and Lamers et al. Cancer Gene Therapy (2002) 9, 613-623.

[0228] Method of transducing with a CAR are known in the art and are disclosed e.g. in Davila et al. Oncoimmunology. 2012 Dec. 1; 1(9):1577-1583; Wang and Rivière Cancer Gene Ther. 2015 March; 22(2):85-94); and Maus et al. Blood. 2014 Apr. 24; 123(17):2625-35.

[0229] Alternatively or additionally the agent may be attached to a heterologous therapeutic moiety (methods of conjugation are described hereinbelow). The therapeutic moiety can be, for example, a cytotoxic moiety, a toxic moiety [e.g., Pseudomonas exotoxin (GenBank Accession Nos. AAB25018 and S53109); PE38KDEL; Diphtheria toxin (GenBank Accession Nos. E00489 and E00489); Ricin A toxin (GenBank Accession Nos. 225988 and A23903)], a cytokine moiety [e.g., interleukin 2 (GenBank Accession Nos. CAA00227 and A02159), interleukin 10 (GenBank Accession Nos. P22301 and M57627)], a drug, a chemical, a protein and/or a radioisotope.

[0230] According to specific embodiments, the therapeutic moiety is selected from the group consisting of a toxin, a drug, a chemical, a protein and a radioisotope.

[0231] According to some embodiments of the invention, the therapeutic moiety is conjugated by translationally fusing the polynucleotide encoding the agent of some embodiments of the invention with the nucleic acid sequence encoding the therapeutic moiety.

[0232] Additionally or alternatively, the therapeutic moiety can be chemically conjugated (coupled) to the agent of the invention, using any conjugation method known to one skilled in the art. For example, a peptide can be conjugated to an agent of interest, using a 3-(2-pyridyldithio)propionic acid Nhydroxysuccinimide ester (also called N-succinimidyl 3-(2-pyridyldithio) propionate) (“SDPD”) (Sigma, Cat. No. P-3415; see e.g., Cumber et al. 1985, Methods of Enzymology 112: 207-224), a glutaraldehyde conjugation procedure (see e.g., G. T. Hermanson 1996, “Antibody Modification and Conjugation, in Bioconjugate Techniques. Academic Press, San Diego) or a carbodiimide conjugation procedure [see e.g., J. March. Advanced Organic Chemistry: Reaction's, Mechanism, and Structure, pp. 349-50 & 372-74 (3d ed.), 1985; B. Neises et al. 1978, Angew Chem., Int. Ed. Engl. 17:522; A. Hassner et al. 1978, Tetrahedron Lett. 4475; E. P. Boden et al. 1986. J. Org. Chem. 50:2394 and L. J. Mathias 1979. Synthesis 561].

[0233] According to specific embodiments the agent is bound to a detectable moiety.

[0234] Examples of detectable moieties that can be used in the present invention include but are not limited to radioactive isotopes, phosphorescent chemicals, chemiluminescent chemicals, fluorescent chemicals, enzymes, fluorescent polypeptides, a radioactive isotope (such as ^{[125]}iodine) and epitope tags. The detectable moiety can be a member of a binding pair, which is identifiable via its interaction with an additional member of the binding pair, and a label which is directly visualized. In one example, the member of the binding pair is an antigen which is identified by a corresponding labeled antibody. In one example, the label is a fluorescent protein or an enzyme producing a colorimetric reaction.

[0235] Further examples of detectable moieties, include those detectable by Positron Emission Tomagraphy (PET) and Magnetic Resonance Imaging (MRI), all of which are well known to those of skill in the art.

[0236] Any of the proteinaceous agents described herein can be encoded from a polynucleotide. These polynucleotides can be used as therapeutics per se or in the recombinant production of the agent or the peptide.

[0237] Thus, according to an aspect of the present invention there is provided a polynucleotide encoding the agent or the peptide.

[0238] As used herein the term “polynucleotide” refers to a single or double stranded nucleic acid sequence which is isolated and provided in the form of an RNA sequence, a complementary polynucleotide sequence (cDNA), a genomic polynucleotide sequence and/or a composite polynucleotide sequences (e.g., a combination of the above).

[0239] To express exogenous peptide or agent in mammalian cells, a polynucleotide sequence encoding the agent is preferably ligated into a nucleic acid construct suitable for mammalian cell expression.

[0240] Thus, according to an aspect of the present invention there is provided a nucleic acid construct comprising the isolated polynucleotide.

[0241] Such a nucleic acid construct or system includes at least one cis-acting regulatory element for directing expression of the nucleic acid sequence. Cis-acting regulatory sequences include those that direct constitutive expression of a nucleotide sequence as well as those that direct inducible expression of the nucleotide sequence only under certain conditions. Thus, for example, a promoter sequence for directing transcription of the polynucleotide sequence in the cell in a constitutive or inducible manner is included in the nucleic acid construct.

[0242] Also provided are cells which comprise the polynucleotides/expression vectors as described herein.

[0243] Such cells are typically selected for high expression of recombinant proteins (e.g., bacterial, plant or eukaryotic cells e.g., CHO. HEK-293 cells), but may also be an immune cell (e.g., macrophages, dendritic cells. T cells. B cells or NK cells) when for instance the CDRs of the agent are implanted in a T Cell Receptor or CAR transduced in said cells which are used in adoptive cell therapy.

[0244] The expression pattern of the peptides described herein renders the agents that bind them particularly suitable for diagnostic and therapeutic applications.

[0245] Thus, according to an aspect of the present invention there is provided a method of eliciting an immune response in a subject in need thereof, the method comprising administering to the subject an effective amount of the agent or an immune cell expressing same, thereby eliciting an immune response in the subject.

[0246] As used herein, the term “subject” refers to humans and animals having an MHC system, such as the HLA system in humans. The subject may be of any gender and of any age.

[0247] According to specific embodiments, the subject is a human subject.

[0248] According to specific embodiments, the subject expresses HLA class I haplotype selected from the group consisting of HLA-A0201. HLA-B5401, HLA-B5101. HLA-A6802, HLA-B4402. HLA-B4403 and HLA-A3101.

[0249] According to specific embodiments, the subject is diagnosed with a disease (i.e., cancer) or is at risk of to develop a disease (i.e. cancer).

[0250] According to other specific embodiments, the subject is not diagnosed with cancer and is undergoing a routine well-being checkup.

[0251] According to specific embodiments, the subject is at risk of having cancer (e.g., a genetically predisposed subject, a subject with medical and/or family history of cancer, a subject who has been exposed to carcinogens, occupational hazard, environmental hazard) and/or exhibits suspicious clinical signs of cancer [e.g., blood in the stool or melena, unexplained pain, sweating, unexplained fever, unexplained loss of weight up to anorexia, changes in bowel habits (constipation and/or diarrhea), tenesmus (sense of incomplete defecation, for rectal cancer specifically), anemia and/or general weakness].

[0252] According to specific embodiments, cells of the subject present the peptide at a level above a predetermined threshold.

[0253] According to an additional or an alternative aspect of the present invention, there is provided a method of treating cancer in a subject in need thereof, the method comprising administering to the subject a therapeutically effective amount of the agent or the cell expressing same, thereby treating the cancer in the subject.

[0254] According to an additional or an alternative aspect of the present invention, there is provided the agent or the cell expressing same, for use in treating cancer in a subject in need thereof.

[0255] As used herein the term “treating” refers to inhibiting, preventing or arresting the development of a pathology (disease, disorder, or condition e.g., cancer) and/or causing the reduction, remission, or regression of a pathology. Those of skill in the art will understand that various methodologies and assays can be used to assess the development of a pathology, and similarly, various methodologies and assays may be used to assess the reduction, remission or regression of a pathology.

[0256] According to specific embodiments, treatment may be evaluated by a decrease in tumor volume, a decrease in the number of tumor cells, a decrease in the number of metastases, an increase in life expectancy, or amelioration of various physiological symptoms associated with the cancerous condition.

[0257] As used herein, the term cancer encompasses both malignant and pre-malignant cancers.

[0258] According to specific embodiments, the cancer comprises malignant cancer.

[0259] Cancers which can be treated by the methods of some embodiments of the invention can be any solid or non-solid cancer and/or cancer metastasis. Examples of cancer include but are not limited to, carcinoma, lymphoma, blastoma, sarcoma, and leukemia. More particular examples of such cancers include squamous cell cancer, lung cancer (including small-cell lung cancer, non-small-cell lung cancer, adenocarcinoma of the lung, and squamous carcinoma of the lung), cancer of the peritoneum, hepatocellular cancer, gastric or stomach cancer (including gastrointestinal cancer), pancreatic cancer, glioblastoma, cervical cancer, ovarian cancer, liver cancer, bladder cancer, hepatoma, breast cancer, colon cancer, colorectal cancer, endometrial or uterine carcinoma, salivary gland carcinoma, kidney or renal cancer, liver cancer, prostate cancer, vulval cancer, thyroid cancer, hepatic carcinoma and various types of head and neck cancer, as well as B-cell lymphoma (including low grade/follicular non-Hodgkin's lymphoma (NHL); small lymphocytic (SL) NHL; intermediate grade/follicular NHL; intermediate grade diffuse NHL; high grade immunoblastic NHL; Burkitt lymphoma, Diffused large B cell lymphoma (DLBCL), high grade lymphoblastic NHL; high-grade small non-cleaved cell NHL; bulky disease NHL; mantle cell lymphoma; AIDS-related lymphoma; and Waldenstrom's Macroglobulinemia); T cell lymphoma. Hodgkin lymphoma, chronic lymphocytic leukemia (CLL); acute lymphoblastic leukemia (ALL); Acute myeloid leukemia (AML). Acute promyelocytic leukemia (APL). Hairy cell leukemia; chronic myeloblastic leukemia (CML); and post-transplant lymphoproliferative disorder (PTLD), as well as abnormal vascular proliferation associated with phakomatoses, edema (such as that associated with brain tumors), and Meigs' syndrome. Preferably, the cancer is selected from the group consisting of breast cancer, colorectal cancer, rectal cancer, non-small cell lung cancer, non-Hodgkins lymphoma (NHL), renal cell cancer, prostate cancer, liver cancer, pancreatic cancer, soft-tissue sarcoma. Kaposi's sarcoma, carcinoid carcinoma, head and neck cancer, melanoma, ovarian cancer, mesothelioma, and multiple myeloma. The cancerous conditions amenable for treatment of the invention include metastatic cancers.

[0260] According to specific embodiments, the cancer comprises pre-malignant cancer.

[0261] Pre-malignant cancers (or pre-cancers) are well characterized and known in the art (refer, for example, to Berman J J. and Henson D E., 2003. Classifying the precancers: a metadata approach. BMC Med Inform Decis Mak. 3:8). Classes of pre-malignant cancers amenable to treatment via the method of the invention include acquired small or microscopic pre-malignant cancers, acquired large lesions with nuclear atypia, precursor lesions occurring with inherited hyperplastic syndromes that progress to cancer, and acquired diffuse hyperplasias and diffuse metaplasias. Examples of small or microscopic pre-malignant cancers include HGSIL (High grade squamous intraepithelial lesion of uterine cervix). AIN (anal intraepithelial neoplasia), dysplasia of vocal cord, aberrant crypts (of colon). PIN (prostatic intraepithelial neoplasia). Examples of acquired large lesions with nuclear atypia include tubular adenoma, AILD (angioimmunoblastic lymphadenopathy with dysproteinemia), atypical meningioma, gastric polyp, large plaque parapsoriasis, myelodysplasia, papillary transitional cell carcinoma in-situ, refractory anemia with excess blasts, and Schneiderian papilloma. Examples of precursor lesions occurring with inherited hyperplastic syndromes that progress to cancer include atypical mole syndrome. C cell adenomatosis and MEA. Examples of acquired diffuse hyperplasias and diffuse metaplasias include AIDS, atypical lymphoid hyperplasia, Paget's disease of bone, post-transplant lymphoproliferative disease and ulcerative colitis.

[0262] According to specific embodiments, the cancer is selected from the group consisting of glioblastoma, B cell leukemia, meningioma, melanoma, colon cancer and breast cancer.

[0263] According to specific embodiments, cancerous cells present the disclosed peptide.

[0264] According to specific embodiments, when the modified peptide amino acid sequence is selected from the group consisting of SEQ ID NO: 1-209 and 10819; said cancer is B cell leukemia.

[0265] According to specific embodiments, when the modified peptide amino acid sequence is selected from the group consisting of SEQ ID NO: 210-943; the cancer is breast cancer.

[0266] According to specific embodiments, when the modified peptide amino acid sequence is selected from the group consisting of SEQ ID NO: 944-1117 and 10820; the cancer is colon cancer.

[0267] According to specific embodiments, when the modified peptide amino acid sequence is selected from the group consisting of SEQ ID NO: 1118-1691 and 10817; the cancer is glioblastoma.

[0268] According to specific embodiments, when the modified peptide amino acid sequence is selected from the group consisting of SEQ ID NO: 1962-8276; the cancer is melanoma.

[0269] According to specific embodiments, when the modified peptide amino acid sequence is selected from the group consisting of SEQ ID NO: 8277-8897; the cancer is meningioma.

[0270] According to specific embodiments, when the un-modified peptide amino acid sequence is selected from the group consisting of SEQ ID NO: 10747-10748; the cancer is B cell leukemia.

[0271] According to specific embodiments, when the un-modified peptide amino acid sequence is selected from the group consisting of SEQ ID NO: 10749-10756 and 10822; the cancer is breast cancer.

[0272] According to specific embodiments, when the un-modified peptide is as set forth in SEQ ID NO: 10757; the cancer is colon cancer.

[0273] According to specific embodiments, when the un-modified peptide amino acid sequence is selected from the group consisting of SEQ ID NO: 10758-10796; the cancer is melanoma.

[0274] According to specific embodiments, when the un-modified peptide amino acid sequence is selected from the group consisting of SEQ ID NO: 10797-10806; the cancer is meningioma.

[0275] According to specific embodiments, cells of the cancer present the peptide at a level above a predetermined threshold.

[0276] Such a predetermined threshold can be experimentally determined by comparing presentation levels in a biological sample derived from subjects diagnosed with cancer to a biological sample obtained from healthy subjects (e.g., not having cancer). Alternatively or additionally, such a predetermined threshold can be experimentally determined by comparing presentation levels in cancer cells to presentation levels in healthy cells obtained from the same subject. Alternatively, such a level can be obtained from the scientific literature and from databases.

[0277] According to specific embodiments, the level above a predetermined threshold is statistically significant.

[0278] According to specific embodiments the increase from a predetermined threshold is at least 5%, at least 10%, at least 20%, at least 30%, at least 40%, at least 50%, at least 60%, at least 70%, at least 80%, at least 90%, at least 95%, at least 100% or more, higher than about 2 times, higher than about three times, higher than about four time, higher than about five times, higher than about six times, higher than about seven times, higher than about eight times, higher than about nine times, higher than about 20 times, higher than about 50 times, higher than about 100 times, higher than about 200 times, higher than about 350, higher than about 500 times, higher than about 1000 times, or more as compared to the control sample as measured using the same assay.

[0279] Methods of determining presentation of the peptides are known in the art, and include e.g. flow cytometry, immunohistochemistry and the like.

[0280] Alternatively or additionally, the expression pattern of the peptides described herein renders them suitable for therapeutic applications e.g, as anti-cancer vaccines.

[0281] Thus, according to an aspect of the present invention there is provided a method of eliciting an immune response in a subject in need thereof, the method comprising administering to the subject an effective amount of a peptide comprising an amino acid sequence selected from the group consisting of SEQ ID NO: 1-10746, 10817, 10819, 10820, 10823, 10824, 10826 and 10827 having the corresponding modification according to Table 3, thereby eliciting an immune response to a cell presenting said amino acid sequence having said corresponding modification in the subject.

[0282] Alternatively or additionally, according to an aspect of the present invention there is provided a method of eliciting an immune response in a subject in need thereof, the method comprising administering to the subject an effective amount of a peptide comprising an amino acid sequence having a ubiquitin or a ubiquitin-like (UBL) modifier tail, thereby eliciting an immune response to a cell presenting said amino acid sequence having said ubiquitin or said UBL modifier tail in the subject.

[0283] Alternatively or additionally, according to an aspect of the present invention there is provided a method of eliciting an immune response in a subject in need thereof, the method comprising administering to the subject an effective amount of a peptide comprising an amino acid sequence selected from the group consisting of SEQ ID NO: 10747-10816 and 10822, thereby eliciting an immune response to a cell presenting said amino acid sequence in the subject.

[0284] Alternatively or additionally, according to an aspect of the present invention there is provided a method of treating cancer in a subject in need thereof, the method comprising administering to the subject a therapeutically effective amount of a peptide comprising an amino acid sequence selected from the group consisting of SEQ ID NO: 1-10746, 10817, 10819, 10820, 10823, 10824, 10826 and 10827 having the corresponding modification according to Table 3, thereby treating the cancer in the subject.

[0285] Alternatively or additionally, according to an aspect of the present invention there is provided a method of treating cancer in a subject in need thereof, the method comprising administering to the subject a therapeutically effective amount of a peptide comprising an amino acid sequence having a ubiquitin or a ubiquitin-like (UBL) modifier tail, thereby treating the cancer in the subject.

[0286] Alternatively or additionally, according to an aspect of the present invention there is provided a method of treating cancer in a subject in need thereof, the method comprising administering to the subject a therapeutically effective amount of a peptide comprising an amino acid sequence selected from the group consisting of SEQ ID NO: 10747-10816 and 10822, thereby treating the cancer in the subject.

[0287] Alternatively or additionally, according to an aspect of the present invention there is provided a peptide comprising an amino acid sequence selected from the group consisting of SEQ ID NO: 1-10746, 10817, 10819, 10820, 10823, 10824, 10826 and 10827 having the corresponding modification according to Table 3, for use in treating cancer in a subject in need thereof.

[0288] Alternatively or additionally, according to an aspect of the present invention there is provided a peptide comprising an amino acid sequence having a ubiquitin or a ubiquitin-like (UBL) modifier tail, for use in treating cancer in a subject in need thereof.

[0289] Alternatively or additionally, according to an aspect of the present invention there is provided a peptide comprising an amino acid sequence selected from the group consisting of SEQ ID NO: 10747-10816 and 10822, for use in treating cancer in a subject in need thereof.

[0290] According to specific embodiments, the amino acid sequence having a ubiquitin or a ubiquitin-like (UBL) modifier tail is selected from the group of sequences listed in Table 5.

[0291] According to specific embodiments, the peptide is capable of being presented by a MHC molecule.

[0292] According to specific embodiments, the peptide is capable of eliciting an immune response to a cell presenting the specified amino acid sequence.

[0293] According to specific embodiments, the peptide is capable of eliciting an immune response to a cell presenting the specified amino acid sequence having the corresponding modification or the ubiquitin or UBL modifier tail.

[0294] Methods of determining the ability to elicit an immune response are known in the art and are further described hereinabove.

[0295] According to specific embodiments, the peptide is no more than 50 amino acids in length.

[0296] According to specific embodiments, the peptide is between 9-50 amino acids, 9-40 amino acids, 9-30 amino acids, 9-20 amino acids, or between 9-13 amino acids long.

[0297] According to specific embodiments, the peptide is no more than 20 amino acids in length.

[0298] According to specific embodiments, the peptide is no more than 14 amino acids in length.

[0299] According to specific embodiments, the peptide amino acid sequence consists of the amino acid sequence specified.

[0300] The term “peptide” in the aspects referring to their use encompasses native peptides (either degradation products, synthetically synthesized peptides or recombinant peptides) and peptidomimetics (typically, synthetically synthesized peptides), as well as peptoids and semipeptoids which are peptide analogs, which may have, for example, modifications rendering the peptides more stable while in a body or more capable of penetrating into cells. Such modifications include, but are not limited to N terminus modification, C terminus modification, peptide bond modification, backbone modifications, and residue modification. Methods for preparing peptidomimetic compounds are well known in the art and are specified, for example, in Quantitative Drug Design, C. A. Ramsden Gd., Chapter 17.2, F. Choplin Pergamon Press (1992), which is incorporated by reference as if fully set forth herein. Further details in this respect are provided hereinunder.

[0301] Peptide bonds (—CO—NH—) within the peptide may be substituted, for example, by N-methylated amide bonds (—N(CH3)-CO—), ester bonds (—C(═O)—O—), ketomethylene bonds (—CO—CH2-), sulfinylmethylene bonds (—S(═O)—CH2-), α-aza bonds (—NH—N(R)—CO—), wherein R is any alkyl (e.g., methyl), amine bonds (—CH2-NH—), sulfide bonds (—CH2-S—), ethylene bonds (—CH2-CH2-), hydroxyethylene bonds (—CH(OH)—CH2-), thioamide bonds (—CS—NH—), olefinic double bonds (—CH═CH—), fluorinated olefinic double bonds (—CF═CH—), retro amide bonds (—NH—CO—), peptide derivatives (—N(R)—CH2-CO—), wherein R is the “normal” side chain, naturally present on the carbon atom.

[0302] These modifications can occur at any of the bonds along the peptide chain and even at several (2-3) bonds at the same time.

[0303] Natural aromatic amino acids, Trp, Tyr and Phe, may be substituted by non-natural aromatic amino acids such as 1,2,3,4-tetrahydroisoquinoline-3-carboxylic acid (Tic), naphthylalanine, ring-methylated derivatives of Phe, halogenated derivatives of Phe or O-methyl-Tyr.

[0304] The peptides of some embodiments of the invention may also include one or more modified amino acids or one or more non-amino acid monomers (e.g. fatty acids, complex carbohydrates etc).

[0305] The term “amino acid” or “amino acids” in the aspects referring to their use is understood to include the 20 naturally occurring amino acids; those amino acids often modified post-translationally in vivo, including, for example, hydroxyproline, phosphoserine and phosphothreonine; and other unusual amino acids including, but not limited to, 2-aminoadipic acid, hydroxylysine, isodesmosine, nor-valine, nor-leucine and ornithine. Furthermore, the term “amino acid” includes both D- and L-amino acids.

[0306] Tables 6 and 7 below list naturally occurring amino acids (Table 6), and non-conventional or modified amino acids (e.g., synthetic, Table 7) which can be used with some embodiments of the invention.

TABLE 6

| | Three-Letter | One-letter |
|---|---|---|
| Amino Acid | Abbreviation | Symbol |
| Alanine | Ala | A |
| Arginine | Arg | R |
| Asparagine | Asn | N |
| Aspartic acid | Asp | D |
| Cysteine | Cys | C |
| Glutamine | Gln | Q |
| Glutamic Acid | Glu | E |
| Glycine | Gly | G |
| Histidine | His | H |
| Isoleucine | Ile | I |
| Leucine | Leu | L |
| Lysine | Lys | K |
| Methionine | Met | M |
| Phenylalanine | Phe | F |
| Proline | Pro | P |
| Serine | Ser | S |
| Threonine | Thr | T |
| Tryptophan | Trp | W |
| Tyrosine | Tyr | Y |
| Valine | Val | V |
| Any amino acid as above | Xaa | X |

TABLE 7

| Non-conventional amino | | | |
|---|---|---|---|
| acid | Code | Non-conventional amino acid | Code |
| ornithine | Orn | hydroxyproline | Hyp |
| α-aminobutyric acid | Abu | aminonorbornyl- | Norb |
| | | carboxylate | |
| D-alanine | Dala | aminocyclopropane- | Cpro |
| | | carboxylate | |
| D-arginine | Darg | N-(3-guanidinopropyl)glycine | Narg |
| D-asparagine | Dasn | N-(carbamylmethyl)glycine | Nasn |
| D-aspartic acid | Dasp | N-(carboxymethyl)glycine | Nasp |
| D-cysteine | Dcys | N-(thiomethyl)glycine | Ncys |
| D-glutamine | Dgln | N-(2-carbamylethyl)glycine | Ngln |
| D-glutamic acid | Dglu | N-(2-carboxyethyl)glycine | Nglu |
| D-histidine | Dhis | N-(imidazolylethyl)glycine | Nhis |
| D-isoleucine | Dile | N-(1-methylpropyl)glycine | Nile |
| D-leucine | Dleu | N-(2-methylpropyl)glycine | Nleu |
| D-lysine | Dlys | N-(4-aminobutyl)glycine | Nlys |
| D-methionine | Dmet | N-(2-methylthioethyl)glycine | Nmet |
| D-ornithine | Dorn | N-(3-aminopropyl)glycine | Norn |
| D-phenylalanine | Dphe | N-benzylglycine | Nphe |
| D-proline | Dpro | N-(hydroxymethyl)glycine | Nser |
| D-serine | Dser | N-(1-hydroxyethyl)glycine | Nthr |
| D-threonine | Dthr | N-(3-indolylethyl)glycine | Nhtrp |
| D-tryptophan | Dtrp | N-(p-hydroxyphenyl)glycine | Ntyr |
| D-tyrosine | Dtyr | N-(1-methylethyl)glycine | Nval |
| D-valine | Dval | N-methylglycine | Nmgly |
| D-N-methylalanine | Dnmala | L-N-methylalanine | Nmala |
| D-N-methylarginine | Dnmarg | L-N-methylarginine | Nmarg |
| D-N-methylasparagine | Dnmasn | L-N-methylasparagine | Nmasn |
| D-N-methylasparatate | Dnmasp | L-N-methylaspartic acid | Nmasp |
| D-N-methylcysteine | Dnmcys | L-N-methylcysteine | Nmcys |
| D-N-methylglutamine | Dnmgln | L-N-methylglutamine | Nmgln |
| D-N-methylglutamate | Dnmglu | L-N-methylglutamic acid | Nmglu |
| D-N-methylhistidine | Dnmhis | L-N-methylhistidine | Nmhis |
| D-N-methylisoleucine | Dnmile | L-N-methylisolleucine | Nmile |
| D-N-methylleucine | Dnmleu | L-N-methylleucine | Nmleu |
| D-N-methyllysine | Dnmlys | L-N-methyllysine | Nmlys |
| D-N-methylmethionine | Dnmmet | L-N-methylmethionine | Nmmet |
| D-N-methylornithine | Dnmorn | L-N-methylornithine | Nmorn |
| D-N-methylphenylalanine | Dnmphe | L-N-methylphenylalanine | Nmphe |
| D-N-methylproline | Dnmpro | L-N-methylproline | Nmpro |
| D-N-methylserine | Dnmser | L-N-methylserine | Nmser |
| D-N-methylthreonine | Dnmthr | L-N-methylthreonine | Nmthr |
| D-N-methyltryptophan | Dnmtrp | L-N-methyltryptophan | Nmtrp |
| D-N-methyltyrosine | Dnmtyr | L-N-methyltyrosine | Nmtyr |
| D-N-methylvaline | Dnmval | L-N-methylvaline | Nmval |
| L-norleucine | Nle | L-N-methylnorleucine | Nmnle |
| L-norvaline | Nva | L-N-methylnorvaline | Nmnva |
| L-ethylglycine | Etg | L-N-methyl-ethylglycine | Nmetg |
| L-t-butylglycine | Tbug | L-N-methyl-t-butylglycine | Nmtbug |
| L-homophenylalanine | Hphe | L-N-methyl-homophenylalanine | Nmhphe |
| C-naphthylalanine | Anap | N-methyl-α-naphthylalanine | Nmanap |
| penicillamine | Pen | N-methylpenicillamine | Nmpen |
| γ-aminobutyric acid | Gabu | N-methyl-γ-aminobutyrate | Nmgabu |
| cyclobexylalanine | Chexa | N-methyl-cyclohexylalanine | Nmchexa |
| cyclopentylalanine | Cpen | N-methyl-cyclopentylalanine | Nmcpen |
| α-amino-α-methylbutyrate | Aabu | N-methyl-α-amino-α- | Nmaabu |
| | | methylbutyrate | |
| α-aminoisobutyric acid | Aib | N-methyl-α-aminoisobutyrate | Nmaib |
| D-α-methylarginine | Dmarg | L-α-methylarginine | Marg |
| D-α-methylasparagine | Dmasn | L-α-methylasparagine | Masn |
| D-α-methylaspartate | Dmasp | L-α-methylaspartate | Masp |
| D-α-methylcysteine | Dmcys | L-α-methylcysteine | Mcys |
| D-α-methylglutamine | Dmgln | L-α-methylglutamine | Mgln |
| D-α-methyl glutamic acid | Dmglu | L-α-methylglutamate | Mglu |
| D-α-methylhistidine | Dmhis | L-α-methylhistidine | Mhis |
| D-α-methylisoleucine | Dmile | L-α-methylisoleucine | Mile |
| D-α-methylleucine | Dmleu | L-α-methylleucine | Mleu |
| D-α-methyllysine | Dmlys | L-α-methyllysine | Mlys |
| D-α-methylmethionine | Dmmet | L-α-methylmethionine | Mmet |
| D-α-methylornithine | Dmorn | L-α-methylornithine | Morn |
| D-α-methylphenylalanine | Dmphe | L-α-methylphenylalanine | Mphe |
| D-α-methylproline | Dmpro | L-α-methylproline | Mpro |
| D-α-methylserine | Dmser | L-α-methylserine | Mser |
| D-α-methylthreonine | Dmthr | L-α-methylthreonine | Mthr |
| D-α-methyltryptophan | Dmtrp | L-α-methyltryptophan | Mtrp |
| D-α-methyltyrosine | Dmtyr | L-α-methyltyrosine | Mtyr |
| D-α-methylvaline | Dmval | L-α-methylvaline | Mval |
| N-cyclobutylglycine | Ncbut | L-α-methylnorvaline | Mnva |
| N-cycloheptylglycine | Nchep | L-α-methylethylglycine | Metg |
| N-cyclohexylglycine | Nchex | L-α-methyl-t-butylglycine | Mtbug |
| N-cyclodecylglycine | Ncdec | L-α-methyl-homophenylalanine | Mhphe |
| N-cyclododecylglycine | Ncdod | α-methyl-α-naphthylalanine | Manap |
| N-cyclooctylglycine | Ncoct | α-methylpenicillamine | Mpen |
| N-cyclopropylglycine | Ncpro | α-methyl-γ-aminobutyrate | Mgabu |
| N-cycloundecylglycine | Ncund | α-methyl-cyclohexylalanine | Mchexa |
| N-(2-aminoethyl)glycine | Naeg | α-methyl-cyclopentylalanine | Mcpen |
| N-(2,2-diphenylethyl)glycine | Nbhm | N-(N-(2,2-diphenylethyl) | Nnbhm |
| | | carbamylmethyl-glycine | |
| N-(3,3- | Nbhe | N-(N-(3,3-diphenylpropyl) | Nnbhe |
| diphenylpropyl)glycine | | carbamylmethyl-glycine | |
| 1-carboxy-1-(2,2-diphenyl | Nmbc | 1,2,3,4-tetrahydroisoquinoline- | Tic |
| ethylamino)cyclopropane | | 3-carboxylic acid | |
| phosphoserine | pSer | phosphothreonine | pThr |
| phosphotyrosine | pTyr | O-methyl-tyrosine | |
| 2-aminoadipic acid | | hydroxylysine | |

[0307] The peptides of some embodiments of the invention are preferably utilized in a linear form, although it will be appreciated that in cases where cyclicization does not severely interfere with peptide characteristics, cyclic forms of the peptide can also be utilized.

[0308] Since the present peptides are preferably utilized in therapeutics or diagnostics which require the peptides to be in soluble form, the peptides of some embodiments of the invention preferably include one or more non-natural or natural polar amino acids, including but not limited to serine and threonine which are capable of increasing peptide solubility due to their hydroxyl-containing side chain.

[0309] The peptides or proteinaceous agents of some embodiments of the invention may be synthesized by any techniques that are known to those skilled in the art of peptide synthesis, including, but not limited to solid phase and recombinant techniques. For solid phase peptide synthesis, a summary of the many techniques may be found in J. M. Stewart and J. D. Young. Solid Phase Peptide Synthesis, W. H. Freeman Co. (San Francisco), 1963 and J. Meicnhofer, Hormonal Proteins and Peptides, vol. 2, p. 46, Academic Press (New York), 1973. For classical solution synthesis see G. Schroder and K. Lupke. The Peptides, vol. 1. Academic Press (New York), 1965. A detailed description on recombinant production is provided hereinabove.

[0310] The N and C termini of the peptides and proteinaceous agents of some embodiments of the present invention may be protected by function groups. According to specific embodiments, the function group does not compromise the biological activity (e.g. being presented by a MHC molecule; eliciting an immune response to a cell presenting the amino acid sequence specified) of the peptide or agent. Suitable functional groups are described in Green and Wuts. “Protecting Groups in Organic Synthesis”. John Wiley and Sons, Chapters 5 and 7, 1991, the teachings of which are incorporated herein by reference. Preferred protecting groups are those that facilitate transport of the compound attached thereto into a cell, for example, by reducing the hydrophilicity and increasing the lipophilicity of the compounds.

[0311] These moieties can be cleaved in vivo, either by hydrolysis or enzymatically, inside the cell. Hydroxyl protecting groups include esters, carbonates and carbamate protecting groups. Amine protecting groups include alkoxy and aryloxy carbonyl groups, as described above for N-terminal protecting groups. Carboxylic acid protecting groups include aliphatic, benzylic and aryl esters, as described above for C-terminal protecting groups. In one embodiment, the carboxylic acid group in the side chain of one or more glutamic acid or aspartic acid residue in a peptide of the present invention is protected, preferably with a methyl, ethyl, benzyl or substituted benzyl ester.

[0312] Examples of N-terminal protecting groups include acyl groups (—CO—R1) and alkoxy carbonyl or aryloxy carbonyl groups (—CO—O—R1), wherein R1 is an aliphatic, substituted aliphatic, benzyl, substituted benzyl, aromatic or a substituted aromatic group. Specific examples of acyl groups include acetyl, (ethyl)-CO—, n-propyl-CO—, iso-propyl-CO—, n-butyl-CO—, sec-butyl-CO—, t-butyl-CO—, hexyl, lauroyl, palmitoyl, myristoyl, stearyl, oleoyl phenyl-CO—, substituted phenyl-CO—, benzyl-CO— and (substituted benzyl)-CO—. Examples of alkoxy carbonyl and aryloxy carbonyl groups include CH3-O—CO—, (ethyl)-O—CO—, n-propyl-O—CO—, iso-propyl-O—CO—, n-butyl-O—CO—, sec-butyl-O—CO—, t-butyl-O—CO—, phenyl-O— CO—, substituted phenyl-O—CO— and benzyl-O—CO—, (substituted benzyl)-O—CO—. Adamantan, naphtalen, myristoleyl, tuluen, biphenyl, cinnamoyl, nitrobenzoy, toluoyl, furoyl, benzoyl, cyclohexane, norbornane, Z-caproic. In order to facilitate the N-acylation, one to four glycine residues can be present in the N-terminus of the molecule.

[0313] The carboxyl group at the C-terminus of the compound can be protected, for example, by an amide (i.e., the hydroxyl group at the C-terminus is replaced with —NH₂, —NHR₂ and —NR₂R₃) or ester (i.e. the hydroxyl group at the C-terminus is replaced with —OR₂). R₂ and R₃ are independently an aliphatic, substituted aliphatic, benzyl, substituted benzyl, aryl or a substituted aryl group. In addition, taken together with the nitrogen atom. R₂ and R₃ can form a C4 to C8 heterocyclic ring with from about 0-2 additional heteroatoms such as nitrogen, oxygen or sulfur. Examples of suitable heterocyclic rings include piperidinyl, pyrrolidinyl, morpholino, thiomorpholino or piperazinyl. Examples of C-terminal protecting groups include —NH₂, —NHCH₃. —N(CH₃)₂, —NH(ethyl), —N(ethyl)₂, —N(methyl) (ethyl), —NH(benzyl), —N(C1-C4 alkyl)(benzyl). —NH(phenyl), —N(C1-C4 alkyl) (phenyl), —OCH₃, —O-(ethyl), —O-n-propyl), —O-(n-butyl), —O-(iso-propyl), —O-(sec-butyl), —O-(t-butyl), —O-benzyl and —O-phenyl.

[0314] The present invention further provides peptide conjugates and fusion polypeptides comprising the peptides disclosed herein.

[0315] The peptides of some embodiments of the present invention may be used alone or in combination (e.g., other peptide as disclosed herein or with other heterologous moieties e.g., Ig domain). Thus, the peptides may be used in a mixture and/or as a chimeric peptide with one or more additional peptides. As used herein, the term “mixture” is defined as a non-covalent combination of peptides existing in variable proportions to one another, whereas the term “chimeric peptide” is defined as at least two identical or non-identical peptides covalently attached one to the other. Such attachment can be any suitable chemical linkage, direct or indirect, as via a peptide bond, or via covalent bonding to an intervening linker element, such as a linker peptide or other chemical moiety, such as an organic polymer. Such chimeric peptides may be linked via bonding at the carboxy (C) or amino (N) termini of the peptides, or via bonding to internal chemical groups such as straight, branched or cyclic side chains, internal carbon or nitrogen atoms, and the like.

[0316] Thus, according to an aspect of the present invention there is provided a multimer of the peptides disclosed herein. The multimer may be a homo- or a hetero-multimer.

[0317] According to another aspect of the present invention there is provided a fusion protein comprising at least one of peptides disclosed herein.

[0318] According to specific embodiments the peptide is complexed with a MHC molecule, such e.g., as disclosed in U.S. Pat. Nos. 7,399,838 and 5,734,023, US Application Publication no. US20050003431 and International Application Publication no. WO2009039854A2.

[0319] The peptides and agents of some embodiments may be attached (either covalently or non-covalently) to a penetrating agent.

[0320] As used herein the phrase “penetrating agent” refers to an agent which enhances translocation of any of the attached peptide or agents across a cell membrane.

[0321] According to one embodiment, the penetrating agent is a peptide and is attached to the peptide or proteinaceous agent (either directly or non-directly) via a peptide bond.

[0322] Typically, peptide penetrating agents have an amino acid composition containing either a high relative abundance of positively charged amino acids such as lysine or arginine, or have sequences that contain an alternating pattern of polar/charged amino acids and non-polar, hydrophobic amino acids.

[0323] According to specific embodiments, the peptide or agent is provided in a formulation suitable for cell penetration that enhances intracellular delivery of the polypeptide or agent as further described hereinbelow.

[0324] By way of non-limiting example, cell penetrating peptide (CPP) sequences may be used in order to enhance intracellular penetration; however, the disclosure is not so limited, and any suitable penetrating agent may be used, as known by those of skill in the art.

[0325] Cell-Penetrating Peptides (CPPs) are short peptides (≤40 amino acids), with the ability to gain access to the interior of almost any cell. They are highly cationic and usually rich in arginine and lysine amino acids. They have the exceptional property of carrying into the cells a wide variety of covalently and noncovalently conjugated cargoes such as proteins, oligonucleotides, and even 200 nm liposomes. Therefore, according to additional exemplary embodiment CPPs can be used to transport the polypeptide or the composition of matter to the interior of cells. TAT (transcription activator from HIV-1), pAntp (also named penetratin, Drosophila antennapedia homeodomain transcription factor) and VP22 (from Herpes Simplex virus) are examples of CPPs that can enter cells in a non-toxic and efficient manner and may be suitable for use with some embodiments of the invention. Protocols for producing CPPs-cargos conjugates and for infecting cells with such conjugates can be found, for example L Theodore et al. [The Journal of Neuroscience, (1995) 15(11): 7158-7167]. Fawell S. et al. [Proc Natl Acad Sci USA. (1994) 91:664-668], and Jing Bian et al. [Circulation Research (2007) 100: 1626-1633].

[0326] According to other specific embodiments of the invention, the peptide or proteinaceous agent is attached to non-amino acid moieties, such as for example, hydrophobic moieties (various linear, branched, cyclic, polycyclic or hetrocyclic hydrocarbons and hydrocarbon derivatives) attached to the peptides; non-peptide penetrating agents; various protecting groups, especially where the compound is linear, which are attached to the compound's terminals to decrease degradation. Chemical (non-amino acid) groups present in the compound may be included in order to improve various physiological properties such as: improve uptake into cells (e.g. cancer cells); decreased degradation or clearance; decreased repulsion by various cellular pumps, improve immunogenic activities, improve various modes of administration; increased specificity, increased affinity, decreased toxicity and the like.

[0327] According to specific embodiments, the peptide or proteinaceous agent and the attached non-proteinaceous moiety are covalently or non-covalently attached, directly or through a spacer or a linker. Modes of binding are described hereinabove and below.

[0328] Attaching the amino acid sequence component of the peptides or proteinaceous agent to other non-amino acid agents may be by covalent linking, by non-covalent complexion, for example, by complexion to a hydrophobic polymer, which can be degraded or cleaved producing a compound capable of sustained release; by entrapping the amino acid part of the peptide in liposomes or micelles to produce the final peptide of the invention. The association may be by the entrapment of the amino acid sequence within the other component (liposome, micelle) or the impregnation of the amino acid sequence within a polymer to produce the final peptide of the invention.

[0329] Exemplary non-proteinaceous moieties which may be used with specific embodiments of the invention include, but are not limited to a drug, a chemical, a small molecule, a polynucleotide, a detectable moiety, polyethylene glycol (PEG), Polyvinyl pyrrolidone (PVP), poly(styrene comaleic anhydride) (SMA), and divinyl ether and maleic anhydride copolymer (DIVEMA). According to specific embodiments, the non-proteinaceous moiety comprises polyethylene glycol (PEG).

[0330] Such a molecule is highly stable (resistant to in-vivo proteolytic activity probably due to steric hindrance conferred by the non-proteinaceous moiety) and may be produced using common solid phase synthesis methods which are inexpensive and highly efficient, as further described hereinbelow. However, it will be appreciated that recombinant techniques may still be used, whereby the recombinant peptide product is subjected to in-vitro modification (e.g., PEGylation as further described hereinbelow).

[0331] Bioconjugation of the peptide amino acid sequence with PEG (i.e., PEGylation) can be effected using PEG derivatives such as N-hydroxysuccinimide (NHS) esters of PEG carboxylic acids, monomethoxyPEG₂-NHS, succinimidyl ester of carboxymethylated PEG (SCM-PEG), benzotriazole carbonate derivatives of PEG, glycidyl ethers of PEG. PEG p-nitrophenyl carbonates (PEG-NPC, such as methoxy PEG-NPC), PEG aldehydes. PEG-orthopyridyl-disulfide, carbonyldimidazol-activated PEGs, PEG-thiol, PEG-maleimide. Such PEG derivatives are commercially available at various molecular weights [See, e.g., Catalog. Polyethylene Glycol and Derivatives, 2000 (Shearwater Polymers. Inc., Huntsvlle, Ala.)]. If desired, many of the above derivatives are available in a monofunctional monomethoxyPEG (mPEG) form. In general, the PEG added to the peptide of the present invention should range from a molecular weight (MW) of several hundred Daltons to about 100 kDa (e.g., between 3-30 kDa). Larger MW PEG may be used, but may result in some loss of yield of PEGylated peptides. The purity of larger PEG molecules should be also watched, as it may be difficult to obtain larger MW PEG of purity as high as that obtainable for lower MW PEG. It is preferable to use PEG of at least 85% purity, and more preferably of at least 90% purity, 95% purity, or higher. PEGylation of molecules is further discussed in, e.g., Hermanson. Bioconjugate Techniques, Academic Press San Diego. Calif. (1996), at Chapter 15 and in Zalipsky et al., “Succinimidyl Carbonates of Polyethylene Glycol.” in Dunn and Ottenbrite, eds., Polymeric Drugs and Drug Delivery Systems, American Chemical Society, Washington, D.C. (1991).

[0332] Conveniently, PEG can be attached to a chosen position in the peptide or proteinaceous agent by site-specific mutagenesis as long as the activity of the conjugate is retained. A target for PEGylation could be any Cysteine residue at the N-terminus or the C-terminus of the peptide sequence. Additionally or alternatively, other Cysteine residues can be added to the peptide amino acid sequence (e.g., at the N-terminus or the C-terminus) to thereby serve as a target for PEGylation. Computational analysis may be effected to select a preferred position for mutagenesis without compromising the activity.

[0333] Various conjugation chemistries of activated PEG such as PEG-maleimide, PEG-vinylsulfone (VS). PEG-acrylate (AC), PEG-orthopyridyl disulfide can be employed. Methods of preparing activated PEG molecules are known in the arts. For example, PEG-VS can be prepared under argon by reacting a dichloromethane (DCM) solution of the PEG-OH with NaH and then with di-vinylsulfone (molar ratios: OH 1:NaH 5:divinyl sulfone 50, at 0.2 gram PEG/mL DCM). PEG-AC is made under argon by reacting a DCM solution of the PEG-OH with acryloyl chloride and triethylamine (molar ratios: OH 1:acryloyl chloride 1.5:triethylamine 2, at 0.2 gram PEG/mL DCM). Such chemical groups can be attached to linearized, 2-arm, 4-arm, or 8-arm PEG molecules.

[0334] Resultant conjugated molecules (e.g., PEGylated or PVP-conjugated polypeptide) are separated, purified and qualified using e.g., high-performance liquid chromatography (HPLC) as well as biological assays.

[0335] According to another embodiment, the peptide or proteinaceous agent is attached to a sustained-release enhancing agent. Exemplary sustained-release enhancing agents include, but are not limited to, hyaluronic acid (HA), alginic acid (AA), polyhydroxyethyl methacrylate (Poly-HEMA), polyethylene glycol (PEG), glyme and polyisopropylacrylamide.

[0336] According to specific embodiments, the peptide is presented in context of an antigen presenting cell. The most common cells used to load antigens are bone marrow and peripheral blood derived dendritic cells (DC), as these cells express co-stimulatory molecules that help activation of CTL. Nevertheless, the peptide presenting cell can also be a macrophage, a B cell or a fibroblast. According to specific embodiments, the antigen presenting cell is a dendritic cell. Presenting the peptide can be effected by a variety of methods, such as, but not limited to, transforming the presenting cell with the polynucleotide encoding the peptide; loading the presenting cell with the peptide. Loading can be external or internal.

[0337] The present invention further encompasses using the peptides in obtaining the agents disclosed herein.

[0338] Thus, according to an aspect of the present invention there is provided a method of obtaining an agent of interest, the method comprising using the modified or unmodified peptide disclosed herein for producing or selecting an agent specifically recognizing said peptide, thereby producing the agent of interest.

[0339] Thus as non-limiting examples, the method comprising immunization using the modified or unmodified peptide disclosed herein for producing an antibody of interest, or phage display for antibody selection.

[0340] The therapeutics agents (e.g. peptides, agents or cells) of some embodiments of the invention can be administered to an organism per se, or in a pharmaceutical composition where it is mixed with suitable carriers or excipients.

[0341] As used herein a “pharmaceutical composition” refers to a preparation of one or more of the active ingredients described herein with other chemical components such as physiologically suitable carriers and excipients. The purpose of a pharmaceutical composition is to facilitate administration of a compound to an organism.

[0342] Herein the term “active ingredient” refers to the peptide, agent or cell accountable for the biological effect.

[0343] Hereinafter, the phrases “physiologically acceptable carrier” and “pharmaceutically acceptable carrier” which may be interchangeably used refer to a carrier or a diluent that does not cause significant irritation to an organism and does not abrogate the biological activity and properties of the administered compound. An adjuvant is included under these phrases.

[0344] According to specific embodiments, the pharmaceutical composition comprises an adjuvant.

[0345] Herein the term “excipient” refers to an inert substance added to a pharmaceutical composition to further facilitate administration of an active ingredient. Examples, without limitation, of excipients include calcium carbonate, calcium phosphate, various sugars and types of starch, cellulose derivatives, gelatin, vegetable oils and polyethylene glycols.

[0346] Techniques for formulation and administration of drugs may be found in “Remington's Pharmaceutical Sciences,” Mack Publishing Co., Easton, PA, latest edition, which is incorporated herein by reference.

[0347] Suitable routes of administration may, for example, include oral, rectal, transmucosal, especially transnasal, intestinal or parenteral delivery, including intramuscular, subcutaneous and intramedullary injections as well as intrathecal, direct intraventricular, intracardiac, e.g., into the right or left ventricular cavity, into the common coronary artery, intravenous, intraperitoneal, intranasal, or intraocular injections.

[0348] Conventional approaches for drug delivery to the central nervous system (CNS) include: neurosurgical strategies (e.g., intracerebral injection or intracerebroventricular infusion); molecular manipulation of the agent (e.g., production of a chimeric fusion protein that comprises a transport peptide that has an affinity for an endothelial cell surface molecule in combination with an agent that is itself incapable of crossing the BBB) in an attempt to exploit one of the endogenous transport pathways of the BBB; pharmacological strategies designed to increase the lipid solubility of an agent (e.g., conjugation of water-soluble agents to lipid or cholesterol carriers); and the transitory disruption of the integrity of the BBB by hyperosmotic disruption (resulting from the infusion of a mannitol solution into the carotid artery or the use of a biologically active agent such as an angiotensin peptide). However, each of these strategies has limitations, such as the inherent risks associated with an invasive surgical procedure, a size limitation imposed by a limitation inherent in the endogenous transport systems, potentially undesirable biological side effects associated with the systemic administration of a chimeric molecule comprised of a carrier motif that could be active outside of the CNS, and the possible risk of brain damage within regions of the brain where the BBB is disrupted, which renders it a suboptimal delivery method.

[0349] Alternately, one may administer the pharmaceutical composition in a local rather than systemic manner, for example, via injection of the pharmaceutical composition directly into a tissue region of a patient.

[0350] Pharmaceutical compositions of some embodiments of the invention may be manufactured by processes well known in the art, e.g., by means of conventional mixing, dissolving, granulating, dragee-making, levigating, emulsifying, encapsulating, entrapping or lyophilizing processes.

[0351] Pharmaceutical compositions for use in accordance with some embodiments of the invention thus may be formulated in conventional manner using one or more physiologically acceptable carriers comprising excipients and auxiliaries, which facilitate processing of the active ingredients into preparations which, can be used pharmaceutically. Proper formulation is dependent upon the route of administration chosen.

[0352] For injection, the active ingredients of the pharmaceutical composition may be formulated in aqueous solutions, preferably in physiologically compatible buffers such as Hank's solution. Ringer's solution, or physiological salt buffer. For transmucosal administration, penetrants appropriate to the barrier to be permeated are used in the formulation. Such penetrants are generally known in the art.

[0353] For oral administration, the pharmaceutical composition can be formulated readily by combining the active compounds with pharmaceutically acceptable carriers well known in the art. Such carriers enable the pharmaceutical composition to be formulated as tablets, pills, dragees, capsules, liquids, gels, syrups, slurries, suspensions, and the like, for oral ingestion by a patient. Pharmacological preparations for oral use can be made using a solid excipient, optionally grinding the resulting mixture, and processing the mixture of granules, after adding suitable auxiliaries if desired, to obtain tablets or dragee cores. Suitable excipients are, in particular, fillers such as sugars, including lactose, sucrose, mannitol, or sorbitol; cellulose preparations such as, for example, maize starch, wheat starch, rice starch, potato starch, gelatin, gum tragacanth, methyl cellulose, hydroxypropylmethyl-cellulose, sodium carbomethylcellulose; and/or physiologically acceptable polymers such as polyvinylpyrrolidone (PVP). If desired, disintegrating agents may be added, such as cross-linked polyvinyl pyrrolidone, agar, or alginic acid or a salt thereof such as sodium alginate.

[0354] Dragee cores are provided with suitable coatings. For this purpose, concentrated sugar solutions may be used which may optionally contain gum arabic, talc, polyvinyl pyrrolidone, carbopol gel, polyethylene glycol, titanium dioxide, lacquer solutions and suitable organic solvents or solvent mixtures. Dyestuffs or pigments may be added to the tablets or dragee coatings for identification or to characterize different combinations of active compound doses.

[0355] Pharmaceutical compositions which can be used orally, include push-fit capsules made of gelatin as well as soft, sealed capsules made of gelatin and a plasticizer, such as glycerol or sorbitol. The push-fit capsules may contain the active ingredients in admixture with filler such as lactose, binders such as starches, lubricants such as talc or magnesium stearate and, optionally, stabilizers. In soft capsules, the active ingredients may be dissolved or suspended in suitable liquids, such as fatty oils, liquid paraffin, or liquid polyethylene glycols. In addition, stabilizers may be added. All formulations for oral administration should be in dosages suitable for the chosen route of administration.

[0356] For buccal administration, the compositions may take the form of tablets or lozenges formulated in conventional manner.

[0357] For administration by nasal inhalation, the active ingredients for use according to some embodiments of the invention are conveniently delivered in the form of an aerosol spray presentation from a pressurized pack or a nebulizer with the use of a suitable propellant, e.g., dichlorodifluoromethane, trichlorofluoromethane, dichloro-tetrafluoroethane or carbon dioxide. In the case of a pressurized aerosol, the dosage unit may be determined by providing a valve to deliver a metered amount. Capsules and cartridges of, e.g., gelatin for use in a dispenser may be formulated containing a powder mix of the compound and a suitable powder base such as lactose or starch.

[0358] The pharmaceutical composition described herein may be formulated for parenteral administration, e.g., by bolus injection or continuous infusion. Formulations for injection may be presented in unit dosage form, e.g., in ampoules or in multidose containers with optionally, an added preservative. The compositions may be suspensions, solutions or emulsions in oily or aqueous vehicles, and may contain formulatory agents such as suspending, stabilizing and/or dispersing agents.

[0359] Pharmaceutical compositions for parenteral administration include aqueous solutions of the active preparation in water-soluble form. Additionally, suspensions of the active ingredients may be prepared as appropriate oily or water based injection suspensions. Suitable lipophilic solvents or vehicles include fatty oils such as sesame oil, or synthetic fatty acids esters such as ethyl oleate, triglycerides or liposomes. Aqueous injection suspensions may contain substances, which increase the viscosity of the suspension, such as sodium carboxymethyl cellulose, sorbitol or dextran. Optionally, the suspension may also contain suitable stabilizers or agents which increase the solubility of the active ingredients to allow for the preparation of highly concentrated solutions.

[0360] Alternatively, the active ingredient may be in powder form for constitution with a suitable vehicle, e.g., sterile, pyrogen-free water based solution, before use.

[0361] The pharmaceutical composition of some embodiments of the invention may also be formulated in rectal compositions such as suppositories or retention enemas, using, e.g., conventional suppository bases such as cocoa butter or other glycerides.

[0362] Pharmaceutical compositions suitable for use in context of some embodiments of the invention include compositions wherein the active ingredients are contained in an amount effective to achieve the intended purpose. More specifically, a therapeutically effective amount means an amount of active ingredients (agent, cell) effective to prevent, alleviate or ameliorate symptoms of a disorder (e.g., cancer) or prolong the survival of the subject being treated.

[0363] Determination of a therapeutically effective amount is well within the capability of those skilled in the art, especially in light of the detailed disclosure provided herein.

[0364] For any preparation used in the methods of the invention, the therapeutically effective amount or dose can be estimated initially from in vitro and cell culture assays. For example, a dose can be formulated in animal models to achieve a desired concentration or titer. Such information can be used to more accurately determine useful doses in humans.

[0365] Toxicity and therapeutic efficacy of the active ingredients described herein can be determined by standard pharmaceutical procedures in vitro, in cell cultures or experimental animals. The data obtained from these in vitro and cell culture assays and animal studies can be used in formulating a range of dosage for use in human. The dosage may vary depending upon the dosage form employed and the route of administration utilized. The exact formulation, route of administration and dosage can be chosen by the individual physician in view of the patient's condition. (See e.g., Fingl, et al., 1975, in “The Pharmacological Basis of Therapeutics”, Ch. 1 p. 1).

[0366] In addition, existing or induced immune response to the agents and/or cells disclosed herein can be tested using e.g. multimers assays, intracellular cytokines release or CTL assays.

[0367] Dosage amount and interval may be adjusted individually to provide that the levels of the active ingredient are sufficient to induce or suppress the biological effect (minimal effective concentration, MEC). The MEC will vary for each preparation, but can be estimated from in vitro data. Dosages necessary to achieve the MEC will depend on individual characteristics and route of administration. Detection assays can be used to determine plasma concentrations.

[0368] Depending on the severity and responsiveness of the condition to be treated, dosing can be of a single or a plurality of administrations, with course of treatment lasting from several days to several weeks or until cure is effected or diminution of the disease state is achieved.

[0369] The amount of a composition to be administered will, of course, be dependent on the subject being treated, the severity of the affliction, the manner of administration, the judgment of the prescribing physician, etc.

[0370] It will be appreciated that the therapeutic agents of the present invention can be provided to the individual in combination with each other and/or with additional active agents to achieve an improved therapeutic effect as compared to treatment with each agent by itself. Thus, for example, combination of different agents that match the different HLA alleles of the patients can be used.

[0371] In such therapy, measures (e.g., dosing and selection of the complementary agent) are taken to adverse side effects which may be associated with combination therapies.

[0372] Administration of such combination therapy can be simultaneous, such as in a single capsule having a fixed ratio of these active agents, or in multiple capsules for each agent.

[0373] Compositions of some embodiments of the invention may, if desired, be presented in a pack or dispenser device, such as an FDA approved kit, which may contain one or more unit dosage forms containing the active ingredient. The pack may, for example, comprise metal or plastic foil, such as a blister pack. The pack or dispenser device may be accompanied by instructions for administration. The pack or dispenser may also be accommodated by a notice associated with the container in a form prescribed by a governmental agency regulating the manufacture, use or sale of pharmaceuticals, which notice is reflective of approval by the agency of the form of the compositions or human or veterinary administration. Such notice, for example, may be of labeling approved by the U.S. Food and Drug Administration for prescription drugs or of an approved product insert. Compositions comprising a preparation of the invention formulated in a compatible pharmaceutical carrier may also be prepared, placed in an appropriate container, and labeled for treatment of an indicated condition, as is further detailed above.

[0374] According to specific embodiments, the therapeutic agent disclosed herein (e.g. the peptide, agent and/or cell expressing same) can be administered to a subject with other established or experimental therapeutic regimen to treat cancer including analgetics, chemotherapy, radiotherapy, phototherapy and photodynamic therapy, surgery, nutritional therapy, ablative therapy, combined radiotherapy and chemotherapy, brachiotherapy, proton beam therapy, immunotherapy, cellular therapy, photon beam radiosurgical therapy and other treatment regimens which are well known in the art.

[0375] According to an aspect of the present invention there is provided an article of manufacture comprising the peptide, the agent or the cell disclosed herein and a cancer therapy.

[0376] According to specific embodiment, the, peptide, the agent or the cell disclosed herein and the cancer therapy are packaged in separate containers.

[0377] According to specific embodiment, the peptide, the agent or the cell disclosed herein and the cancer therapy are packaged in a co-formulation.

[0378] According to specific embodiments, the article of manufacture is identified for the treatment of cancer.

[0379] As the identified MHC presented modified and un-modified peptides have been identified by the present inventors as cancer antigens, specific embodiments of the present invention further propose analyzing for the presence and/or level of such presented peptides for the purpose of diagnosing and/or monitoring treatment efficacy.

[0380] Hence, according to an aspect of the present invention, there is provided a method of detecting a cancer cell in a subject, the method comprising determining in a biological sample of the subject a cell surface a level of a peptide having an amino acid sequence selected from the group consisting of SEQ ID NO: 1-10746, 10817, 10819, 10820, 10823, 10824, 10826 and 10827 and the corresponding modification according to Table 3 hereinabove, wherein a level of said peptide above a predetermined threshold and/or increased level relative to a reference biological sample of a healthy subject is indicative of presence of cancer cell in said subject, thereby detecting cancer cell in the subject.

[0381] According to an additional or an alternative aspect of the present invention, there is provided a method of detecting a cancer cell in a subject, the method comprising determining in a biological sample of the subject a cell surface a level of a peptide selected from the group consisting of SEQ ID NO: 10747-10816 and 10822, wherein a level of said peptide above a predetermined threshold and/or increased level relative to a reference biological sample of a healthy subject is indicative of presence of cancer cell in said subject, thereby detecting cancer cell in the subject.

[0382] According to specific embodiments, the presence of the peptide on the cell surface of a cell is indicative of the cancer.

[0383] According to specific embodiments, the level of the peptide on the cell surface of a cell is indicative of the cancer.

[0384] According to specific embodiments, a level above a predetermined threshold is indicative of cancer.

[0385] According to an additional or an alternative aspect of the present invention, there is provided a method of treating cancer in a subject in need thereof, the method comprising detecting the cancer according to the method, and wherein presence of cancer is indicated, treating the subject with a cancer therapy.

[0386] According to specific embodiments, the cancer therapy comprises the peptide, the agent or cells disclosed herein.

[0387] According to an additional or an alternative aspect of the present invention, there is provided a method of monitoring efficacy of cancer therapy in a subject, the method comprising determining in a biological sample of the subject a cell surface level of a peptide having an amino acid sequence selected from the group consisting of SEQ ID NO: 1-10746, 10817, 10819, 10820, 10823, 10824, 10826 and 10827 and the corresponding modification according to Table 3 hereinabove following the cancer therapy, wherein a decrease from a predetermined threshold in the level of said peptide following the cancer therapy indicates efficaciousness of the cancer therapy.

[0388] According to an additional or an alternative aspect of the present invention, there is provided a method of monitoring efficacy of cancer therapy in a subject, the method comprising determining in a biological sample of the subject a cell surface level of a peptide selected from the group consisting of SEQ ID NO: 10747-10616 and 10822 following the cancer therapy, wherein a decrease from a predetermined threshold in the level of said peptide following the cancer therapy indicates efficaciousness of the cancer therapy.

[0389] On the other hand, if there is no change in the cell surface level of the peptide, or in case there is an increase in the level of cell surface amount of the peptide, then the cancer therapy is not efficient in treating the cancer and additional and/or alternative therapies (e.g., treatment regimens) may be used.

[0390] According to specific embodiments of the monitoring aspects disclosed herein, the predetermined threshold is in comparison to the level in the subject prior to cancer therapy.

[0391] According to specific embodiments, the decrease from a predetermined threshold is statistically significant.

[0392] According to specific embodiments of the monitoring aspects disclosed herein, the decrease from a predetermined threshold is at least 1.5 fold, at least 2 fold, at least 3 fold, at least fold, at least 10 fold, or at least 20 fold as compared the level in a control sample prior to the cancer therapy as measured using the same assay.

[0393] According to specific embodiments, the decrease from a predetermined threshold is at least 2%, at least 5%, at least 10%, at least 20%, at least 30%, at least 40%, at least 50%, at least 60%, at least 70%, at least 80%, at least 90%, e.g., 100%, at least 200%, at least 300%, at least 400%, at least 500%, at least 60) % the level in a control sample prior to the cancer therapy as measured using the same assay.

[0394] According to other specific embodiments of the monitoring aspect of the present invention, the pre-determined threshold can be determined in a subset of subjects with known outcome of cancer therapy.

[0395] According to specific embodiments, determining cell surface amount of the peptide is effected in-vitro or ex-vivo.

[0396] Non-limiting examples of biological samples include, but are not limited to, a cell obtained from any tissue biopsy, a tissue, an organ, body fluids such as blood, and rinse fluids.

[0397] The biological sample can be obtained using methods known in the art such as using a syringe with a needle, a scalpel, fine needle biopsy, needle biopsy, core needle biopsy, fine needle aspiration (FNA), surgical biopsy, buccal smear, lavage and the like. According to specific embodiments, the biological sample is obtained by biopsy.

[0398] Methods of determining cell surface amount are known in the art, and include e.g. flow cytometry, immunohistochemistry and the like, which may be effected using e.g. antibodies specific to MHC presented peptide.

[0399] According to specific embodiments, the determining is performed by contacting the biological sample with an agent capable of detecting the MHC presented peptide, e.g. an antibody.

[0400] According to specific embodiments, the contacting is effected under conditions which allow the formation of a complex comprising MHC presented peptide present in the biological sample and the agent (e.g. immunocomplex).

[0401] The complex can be formed at a variety of temperatures, salt concentration and pH values which may vary depending on the method and the biological sample used and those of skills in the art are capable of adjusting the conditions suitable for the formation of each complex.

[0402] Thus, according to an additional or an alternative aspect of the present invention, there is provided a composition of matter comprising a biological sample of a subject, and an agent capable of detecting a MHC presented peptide having an amino acid sequence selected from the group consisting of SEQ ID NO: 1-10746, 10817, 10819, 10820, 10823, 10824, 10826 and 10827 and the corresponding modification according to Table 3 hereinabove.

[0403] According to an additional or an alternative aspect of the present invention, there is provided a composition of matter comprising a biological sample of a subject, and an agent capable of detecting a MHC presented peptide selected from the group consisting of SEQ ID NO: 10747-10816 and 10822.

[0404] According to an aspect of the present invention there is provided an article of manufacture comprising a biological sample of a subject, and in a separate container an agent capable of detecting a MHC presented peptide having an amino acid sequence selected from the group consisting of SEQ ID NO: 1-10746, 10817, 10819, 10820, 10823, 10824, 10826 and 10827 and the corresponding modification according to Table 3 hereinabove.

[0405] According to an aspect of the present invention there is provided an article of manufacture comprising a biological sample of a subject, and in a separate container an agent capable of detecting a MHC presented peptide selected from the group consisting of SEQ ID NO: 10747-10816 and 10822.

[0406] According to specific embodiments, the methods disclosed herein comprise corroborating the diagnosis using a state of the art technique.

[0407] Such methods are known in the art and depend on the cancer type and include, but not limited to, complete blood count (CBC), tumor marked tests (also known as biomarkers), imaging (such as MRI. CT scan. PET-CT, ultrasound, mammography and bone scan), endoscopy, colonoscopy, biopsy and bone marrow aspiration.

[0408] An additional or an alternative aspect of some embodiments relates to systems, methods, an apparatus, and/or code instructions (e.g., stored on a memory and executable by one or more hardware processors) for generating a dataset of post translations modifications (PTM) on major histocompatibility complex (MHC) bound peptides. The systems, methods, apparatus, code instructions may generate the dataset of PTMs on MHC bound peptides described herein. A mass spectrometry (MS) dataset is obtained from a sample of cells associated with a target disease for treatment, where exemplary diseases are for example, as described herein. The dataset stores spectra data elements outputted by a MS device analyzing MHC bound peptides to generate amino acid sequences. Each spectra data element for a respective amino acid sequence of the MHC bound peptides. A reference sequence dataset storing amino acid sequences of proteins is received. A variable modification dataset storing modifications each including a respective amino acid and expected mast shift is received. Multiple combinations are generated, where each combination includes a respective amino acid sequence selected from the reference sequence dataset and at least one modification selected from the variable modification dataset. A parallel search task is executed on multiple processors connected in parallel and/or in a distributed processing computational architecture. Each processor searches for a respective spectra element of the combinations to identify multiple best peptide to spectra matches (PSMs). Each respective processor assigns a ranking score to each respective PSM according to the respective search performed by the respective processor. The PSMs from the multiple processors connected in parallel are aggregated to generate a main PSM list. The main PSM list includes main ranking scores, which are computed from the ranking score of each respective PSM of each respective search. Highest ranking PSMs are selected according to respective main ranking scores. In a modified sequence dataset, modified sequences each including the PTM and sequences corresponding to the selected highest ranking PSMs are stored. The modified sequence dataset stores an indication of binding motifs defined by multiple identified PTMs and corresponding sequence. The modified sequence dataset is provided for selecting a certain binding motif having a certain PTM and corresponding amino acid sequence from the modified sequence dataset capable of specifically binding an MHC presented peptide for treatment of the target disease.

[0409] Optionally, this highest ranking PSMs are further prioritized for inclusion in the modified sequence dataset. Multiple quality assignment measures may be computed, and one or more of the following may be performed using the quality assignment measures: validating the PTM of each member of the PSM aggregation dataset according to the quality measures, filtering ambiguous assignments and isobaric decoys of the PSM aggregation dataset according to a filtering threshold, ranking members of the PSM aggregation dataset, and selecting the highest ranking PSMs according to the highest ranked member of the PSM aggregation dataset.

[0410] Optionally, a training dataset is created by labelling each modified sequence of the modified sequence dataset with an indication of one or more of: an MHC type, parent gene, and position of the motif within a full protein length, and includes an amino acid sequence. PTM type, and position of the PTM on the amino acid sequence. A machine learning (ML) model is trained using the training dataset. For an input of a certain modified sequence defined by a combination of an amino acid sequence and at least one PTM into the ML model, an indication of whether the certain modified sequence is predicted to fit a binding motif that binds to a cell of the MHC type is obtained as an outcome of the ML model. Alternatively or additionally, for an input of an amino acid sequence of a full protein length and PTMs into the ML model, at least one modified sequence predicted to fit a binding motif is obtained as an outcome of the ML model.

[0411] Treatments for the target disease may be created using the modified sequence dataset, as described herein.

[0412] Exemplary machine learning models, as described herein, may include one or more classifiers, neural networks of various architectures (e.g., fully connected, deep, encoder-decoder), support vector machines (SVM), logistic regression, k-nearest neighbor, decision trees, boosting, random forest, and the like. Machine learning models may be trained using supervised approaches and/or unsupervised approaches.

[0413] At least some implementations of the systems, methods, apparatus, and/or code instructions described herein address the technical problem of identifying PTMs in endogenous peptides, optionally, improving spectral assignment rates in mass spectrometry (MS) data of endogenous peptides. At least some implementations of the systems, methods, apparatus, and/or code instructions described herein address the technical problem of identifying motifs that are predicted to bind to MHC of cells. At least some implementations of the systems, methods, apparatus, and/or code instructions described herein improve the technical and/or medical field of immunotherapy, by providing computer implemented methods for predicting motifs that bind to MHC of diseased cells (e.g., cancer) which may be used to create immunotherapy for treating the disease.

[0414] At least some implementations of the systems, methods, apparatus, and/or code instructions described herein improve the technical and/or medical field of machine learning, by creating ML models that predict motifs that bind to certain cells, which may be used to create immunotherapy for treating a disease of the cells. For example, in an analysis of patient cohorts (e.g. as described with reference to Bassani-Sternberg. M. et al. Direct identification of clinically relevant neoepitopes presented on native human melanoma tissue by mass spectrometry. Nat. Commun. 7, (2016), Chong, C. et al. High-throughput and Sensitive Immunopeptidomics Platform Reveals Profound Interferon γ-Mediated Remodeling of the Human Leukocyte Antigen (HLA) Ligandome. Mol. Cell. Proteomics 17, 533-548 (2018), and/or Ternette. N. et al. Immunopeptidomic Profiling of HLA-A2-Positive Triple Negative Breast Cancer Identifies Potential Immunotherapy Target Antigens. Proteomics 18, 1700465 (2018), cell lines (e.g., as described with reference to Bassani-Sternberg. M., Pletscher-Frankild, S., Jensen, L. J. & Mann, M. Mass Spectrometry of Human Leukocyte Antigen Class I Peptidomes Reveals Strong Effects of Protein Abundance and Turnover on Antigen Presentation. Mol. Cell. Proteomics 14, 658-673 (2015) and/or Shraibman, B., Kadosh, D. M., Barnea, E. & Admon, A. Human Leukocyte Antigen (HLA) Peptides Derived from Tumor Antigens Induced by Inhibition of DNA Methylation for Development of Drug-facilitated Immunotherapy. Mol. Cell. Proteomics 15, 3058-3070 (2016)), and mono-allelic (e.g., as described with reference to Abelin, J. G. et al. Mass Spectrometry Profiling of HLA-Associated Peptidomes in Mono-allelic Cells Enables More Accurate Epitope Prediction. Immunity 46, 315-326 (2017)) performed by Inventors using embodiments described herein, HLA immunopeptidomics data reveal that modifications generate novel HLA I binding motifs that could not be identified merely by the amino acid sequence. This finding suggests that existing HLA I binding predictors tools (e.g., as described with reference to Abelin, J. G. et al. Mass Spectrometry Profiling of HLA-Associated Peptidomes in Mono-allelic Cells Enables More Accurate Epitope Prediction. Immunity 46, 315-326 (2017), Jurtz, V. et al. NetMHCpan-4.0: Improved Peptide-MHC Class I Interaction Predictions Integrating Eluted Ligand and Peptide Binding Affinity Data. J. Immunol. 199, 3360-3368 (2017), Gfeller, D. et al. The Length Distribution and Multiple Specificity of Naturally Presented HLA-I Ligands. J. Immunol. 201, 3705-3716 (2018), Bulik-Sullivan, B. et al. Deep learning using tumor HLA peptide mass spectrometry datasets improves neoantigen identification. Nat. Biotechnol. 37, 55-71 (2019), and/or O'Donnell, T. J., Rubinsteyn, A. & Laserson, U. MHCflurry 2.0: Improved Pan-Allele Prediction of MHC Class 1-Presented Peptides by Incorporating Antigen Processing. Cell Syst. 11, 42-48.e7 (2020)) are “blind” to those motifs and purely predict epitopes that contain highly modified amino-acid like cysteine (e.g., as described with reference to Rev, A. et al. Immunoinformatics: Predicting Peptide—MHC Binding). An improved HLA I predictor ML tool is established by training a machine learning module based on a training dataset created from the dataset generated by at least some embodiments described herein that include, for example, unique modified HLA I bound peptides dataset. The training dataset may include, for example, peptide-intrinsic features such as the peptide sequence, the modification type, and position. The training dataset may further incorporate extrinsic features such as the HLA type, parent gene, and known modification sites. The ML model classifies the input modified peptide as a predicted binder/nonbinder to specific HLA haplotype, and/or may suggest the modified potential binders out of a full protein length and a list of modification types.

[0415] The technical problem of identifying PTMs in endogenous peptides arises since almost all proteins are known to be modified in a specific biological context [27] but in a global PTM discovery analysis, only parts of them will be modified. The relative abundance of PTM is lower as the PTMs are sub-stoichiometric, making the PTMs difficult to detect. One existing approach to overcome the under-representation of modified peptides prior to MS analysis is using biochemical methods to enrich the sample for a specific PTM of interest. However, the disadvantage of this approach is that the enrichment step requires more material to start with (challenging in a clinical setting) and typically enriches only specific modifications, making it less suitable for diverse, global PTM analysis. At least some implementations of the systems, methods, apparatus, and/or code instructions described herein are sensitive enough to allow for rapid and combinatorial detection of multiple PTMs without prior biochemical enrichment. Enrichment steps will identify more modification site for a specific type of PTM while a broad analysis will capture better the biological stoichiometry and potential cross-talk between modification types.

[0416] There are major conceptual differences when searching for endogenous peptides (e.g., HLA I peptide) versus performing proteolytic peptide analysis using mass spectrometry (e.g., using the commonly used trypsin, for example, as described with reference to Park, C. Y., Klammer, A. A., Käli, L, MacCoss, M. J. & Noble, W. S. Rapid and accurate peptide identification from tandem mass spectra. J. Proteome Res. 7, 3022-3027 (2008)). In the latter, an expected pattern for cleaved peptides is predicted based on the ability of trypsin to cleave c-terminal to lysine or arginine residues, thereby generating specific termini. Usually, one can settle for two or more unique peptides to infer the existence of a protein in the sample and more than three hits will give a good estimation of the relative abundance of the unique peptide. Most of the time, a protein will have multiple peptides from different regions, which makes the identification more robust against false discoveries. The technical challenge, which is addressed and solved by at least some implementations of the systems, methods, apparatus, and/or code instructions described herein, arises when searching for an endogenous peptide with no known cleavage sites, where the peptide itself the search target. That is why the approach requires a specific search for each potential peptide with an unspecified cleavage.

[0417] The challenges of identifying PTMs on mass spectrometry data and its effect on the search space is described, for example, in a review described with reference to Na, S. & Paek, E. Software eyes for protein post-translational modifications. Mass Spectrom. Rev. 34, 133-147 (2015). When combining multiple potential PTMs and endogenous peptides, exponential growth of the search space results, making search times impractical. The enormous search space causes an over-fitting of matched peptides and makes it difficult to distinguish between true and false peptides identification (e.g., as described with reference to Verheggen, K. et al. Anatomy and evolution of database search engines—a central component of mass spectrometry based proteomic workflows. Mass Spectrom. Rev. 1-15 (2017), doi:10.1002/mas.21543). As such, applying a false discovery rate (FDR) of 1%, as often used for bottom-up proteomics, will decrease the total number of peptide identification. Existing tools use de novo mass spectrum interpretations to create short peptide tags and then combine those tags to a full-length sequence by searching against a reference proteomics dataset, prioritizing unmodified solution and relaying on tryptic peptide characteristics (for example, PEAKs, TagGraph (e.g., as described with reference to Devabhaktuni, A. et al. TagGraph reveals vast protein modification landscapes from large tandem mass spectrometry datasets. Nat. Biotechnol. 37. (2019)). Other tools use external datasets of known modification to run a sequential assignment strategy starting with unmodified sequences and follow-up by known modification sites and then match novel modification (e.g., MetaMorpheus as described with reference to Solntsev, S. K., Shortreed, M. R., Frey. B. L. & Smith, L. M. Enhanced Global Post-translational Modification Discovery with MetaMorpheus. J. Proteome Res. 17, 1844-1851 (2018)). Using existing approaches, existing sequence database searching algorithms create all the possible peptide candidates from a given reference sequence (in-silico digestion), convert them to a theoretical spectrum, compare them to the experimental spectra and calculate a matching score. Adding potential modifications and non-canonical sequences to the theoretical search space exponentially increase the number of peptide possibilities, making search times a limiting factor. At least some implementations of the systems, methods, apparatus, and/or code instructions described herein address the technical problem of increased search time, and provide a solution that provide a reasonable search time, even for extremely large number of possible combinations that are being searched, by using a parallel processing architecture while allowing each spectra assignment (also referred to herein as MS data element) to be tested against any other. At least some implementations of the systems, methods, apparatus, and/or code instructions described herein address the technical problem of false identification, by a prioritization phase that uses quality assignment measures that reduce false identification. At least some implementations of the systems, methods, apparatus, and/or code instructions described herein include proteoforms with PTM in the peptide search space.

[0418] At least some implementations of the systems, methods, apparatus, and/or code instructions described herein provide improvements over existing approaches. For example, in one approach, multiple PTM searches are performed using a sequential assignment. The first assignment is for unmodified peptides. Only spectra that were not assigned in the first phase are considered for modification assignment. Another approach based on sequential assignment uses an external database of known modification sites to search for those in the first phase. Such approaches miss some PTMs. At least some implementations of the systems, methods, apparatus, and/or code instructions described herein are able to find the PTMs missed by this approach. In particular, sequential assignment is not applied. Inventors compared the identifications using embodiments described herein, to those from a standard search (only n-acetylation and methionine oxidation included). Out of the peptide to spectrum matches (PSMs) which conflicted between the two searches (1.22% of PSMs), 67% received a higher scoring match in the multi-modification search. This is a feature of at least some embodiments described herein that allows for better scoring matches to replace previous assignments which cannot happen in sequential search software. On average, the match score was increased by 13%, although score alone is not a guarantee of a true assignment it does suggest the inclusion of a modification in the predicted peptide better described the spectrum.

[0419] Another approach is based only on tryptic digested protein samples, and not HLA peptides. Using trypsin to digest the sample before mass spectrometry analysis allows any matching algorithm to narrow its search space to peptides that are cleaved after lysine or arginine and not before proline. However, when trying to identify endogenous peptides that were not solely cleaved by trypsin, such as in the case of HLA, the cleavage terminus is not restricted and the number of theoretical peptides increases dramatically. Such approaches cannot process peptides cleaved using other approaches.

[0420] At least some embodiments described herein enable finding PTM using proteins cleaved with any and/or unknown approaches, using the distributed and/or parallel computational architecture, which is scalable, and provides no known boundaries to the size of the reference data and/or number of PTMs. A conceptually “unlimited” number of PTMs and/or reference dataset sizes enables explore any combination and/or cross-talk between PTMs. The MHC and/or HLA bounded peptides contain a large variety of PMS and some peptides have more than one PMS. At least some embodiments described herein perform a systematic search that identify more of those peptides and their PTMs.

[0421] At least some implementations of the systems, methods, apparatus, and/or code instructions described herein address the technical problems described herein, improve the technical field as described herein, and/or improve over existing approaches described herein, for example, using one or more of the following features of at least some embodiments described herein:
[0422] Using a two stages, a matching phase, and a prioritizing phase—The matching phase reduces the running time by distributing the matching feature across parallel processing clusters. The merge process of each distributed task allows ranking the peptide to spectra (PSM) assignment from each instance like they were executing on a single search. The prioritizing phase includes several computational steps to validate the PTM identification, filter ambiguous assignment, and isobaric decoys, and help rank the prediction by their quality.
[0423] Merge feature—when running multiple instances of a matching process that matches the MS data elements to a reference dataset of combinations of protein sequences and PTM, each instance provides its respective best match. But each instance searches a different subset of the reference data set and for a different combination of PTMs. As a result, each instance generates a different assignment list with a different expectation score, for example, based on the score histogram calculated for the respective search results. The merge feature described herein compares the results from the different instances and reconstructs the score histogram to recalculate the expectation score.
[0424] Lower rank identification feature—the increased search space creates overfitting of the data and makes it harder to distinguish between true and false identification. In embodiments described herein, this is shown by getting several good assignments with a very similar score. Other approaches take the best score even if the delta score to the next fit (lower ranks) is negligible. In at least some embodiments, all the matches that are in a 5% (or other defined value, for example, 1%, 3%, 7%, 10%, or other) delta score from the leading hit are identified, and used for computing the quality measurements in the prioritizing features. This feature lowers the negative effect of overfitting of the data.
[0425] Modification decoys based on PTM localization window and mass shift—Addresses the technical problem of automating how an expert manually assesses the spectra assignment to a peptide. The manual process is not simply automated, but includes new features that are not and cannot be performed manually, and are not part of any existing automated process. An expert evaluation is one of the most trusted methods to evaluate a spectra assignment and broadly used in research. While an expert invests an average of 30 min per spectra, which is impractical for generating an automated process, at least some embodiments described herein performs them automatically, by includes the one or more of the following features in the prioritizing phase: spectrum annotation, PTM localization, search for mass decoys and/or isobaric masses and search mass boundary effect bias. The annotation feature may implement third-party tools but increases its capabilities dramatically. The annotation is used for PTM validation.
[0426] Search for mass decoys or isobaric masses—all alternative theoretical solution for a specific PTM site are considered, even a solution that was not in the original search criteria. Search mass boundary effect bias—a unique problem when searching for PTMs.
[0427] Combined weighted scoring—the measurements collected per spectrum in the priority phase may be aggregated and/or considered, to determine whether a certain match is valid a potential decoy.
[0428] Enrichment feature—the information gathered during the prioritizing phase enables performing unique enrichment steps when comparing samples.
[0429] Predictor on a unique dataset—the quality dataset of modified immunopeptidomics including previously undiscovered PTMs enables creating a new ML predictor process.

[0430] Before explaining at least one embodiment of the invention in detail, it is to be understood that the invention is not necessarily limited in its application to the details of construction and the arrangement of the components and/or methods set forth in the following description and/or illustrated in the drawings and/or the Examples. The invention is capable of other embodiments or of being practiced or carried out in various ways.

[0431] The present invention may be a system, a method, and/or a computer program product. The computer program product may include a computer readable storage medium (or media) having computer readable program instructions thereon for causing a processor to carry out aspects of the present invention.

[0432] The computer readable storage medium can be a tangible device that can retain and store instructions for use by an instruction execution device. The computer readable storage medium may be, for example, but is not limited to, an electronic storage device, a magnetic storage device, an optical storage device, an electromagnetic storage device, a semiconductor storage device, or any suitable combination of the foregoing. A non-exhaustive list of more specific examples of the computer readable storage medium includes the following: a portable computer diskette, a hard disk, a random access memory (RAM), a read-only memory (ROM), an erasable programmable read-only memory (EPROM or Flash memory), a static random access memory (SRAM), a portable compact disc read-only memory (CD-ROM), a digital versatile disk (DVD), a memory stick, a floppy disk, and any suitable combination of the foregoing. A computer readable storage medium, as used herein, is not to be construed as being transitory signals per se, such as radio waves or other freely propagating electromagnetic waves, electromagnetic waves propagating through a waveguide or other transmission media (e.g., light pulses passing through a fiber-optic cable), or electrical signals transmitted through a wire.

[0433] Computer readable program instructions described herein can be downloaded to respective computing/processing devices from a computer readable storage medium or to an external computer or external storage device via a network, for example, the Internet, a local area network, a wide area network and/or a wireless network. The network may comprise copper transmission cables, optical transmission fibers, wireless transmission, routers, firewalls, switches, gateway computers and/or edge servers. A network adapter card or network interface in each computing/processing device receives computer readable program instructions from the network and forwards the computer readable program instructions for storage in a computer readable storage medium within the respective computing/processing device.

[0434] Computer readable program instructions for carrying out operations of the present invention may be assembler instructions, instruction-set-architecture (ISA) instructions, machine instructions, machine dependent instructions, microcode, firmware instructions, state-setting data, or either source code or object code written in any combination of one or more programming languages, including an object oriented programming language such as Smalltalk. C++ or the like, and conventional procedural programming languages, such as the “C” programming language or similar programming languages. The computer readable program instructions may execute entirely on the user's computer, partly on the user's computer, as a stand-alone software package, partly on the user's computer and partly on a remote computer or entirely on the remote computer or server. In the latter scenario, the remote computer may be connected to the user's computer through any type of network, including a local area network (LAN) or a wide area network (WAN), or the connection may be made to an external computer (for example, through the Internet using an Internet Service Provider). In some embodiments, electronic circuitry including, for example, programmable logic circuitry, field-programmable gate arrays (FPGA), or programmable logic arrays (PLA) may execute the computer readable program instructions by utilizing state information of the computer readable program instructions to personalize the electronic circuitry, in order to perform aspects of the present invention.

[0435] Aspects of the present invention are described herein with reference to flowchart illustrations and/or block diagrams of methods, apparatus (systems), and computer program products according to embodiments of the invention. It will be understood that each block of the flowchart illustrations and/or block diagrams, and combinations of blocks in the flowchart illustrations and/or block diagrams, can be implemented by computer readable program instructions.

[0436] These computer readable program instructions may be provided to a processor of a general purpose computer, special purpose computer, or other programmable data processing apparatus to produce a machine, such that the instructions, which execute via the processor of the computer or other programmable data processing apparatus, create means for implementing the functions/acts specified in the flowchart and/or block diagram block or blocks. These computer readable program instructions may also be stored in a computer readable storage medium that can direct a computer, a programmable data processing apparatus, and/or other devices to function in a particular manner, such that the computer readable storage medium having instructions stored therein comprises an article of manufacture including instructions which implement aspects of the function/act specified in the flowchart and/or block diagram block or blocks.

[0437] The computer readable program instructions may also be loaded onto a computer, other programmable data processing apparatus, or other device to cause a series of operational steps to be performed on the computer, other programmable apparatus or other device to produce a computer implemented process, such that the instructions which execute on the computer, other programmable apparatus, or other device implement the functions/acts specified in the flowchart and/or block diagram block or blocks.

[0438] The flowchart and block diagrams in the Figures illustrate the architecture, functionality, and operation of possible implementations of systems, methods, and computer program products according to various embodiments of the present invention. In this regard, each block in the flowchart or block diagrams may represent a module, segment, or portion of instructions, which comprises one or more executable instructions for implementing the specified logical function(s). In some alternative implementations, the functions noted in the block may occur out of the order noted in the figures. For example, two blocks shown in succession may, in fact, be executed substantially concurrently, or the blocks may sometimes be executed in the reverse order, depending upon the functionality involved. It will also be noted that each block of the block diagrams and/or flowchart illustration, and combinations of blocks in the block diagrams and/or flowchart illustration, can be implemented by special purpose hardware-based systems that perform the specified functions or acts or carry out combinations of special purpose hardware and computer instructions.

[0439] Reference is now made to FIG. 9, which is a flowchart of an exemplary process for generating a modified sequence dataset storing an indication of binding motifs defined by multiple PTM and corresponding sequence, in accordance with some embodiments of the present invention. A certain binding motif having a certain PTM and corresponding amino acid sequence selected from the modified sequence dataset is predicted to be capable of specifically binding an MHC presented peptide for treatment of a target disease. Reference is also made to FIG. 10, which is a flowchart of an exemplary process for generating an ML model using the modified sequence dataset, in accordance with some embodiments of the present invention. Reference is also made to FIG. 11, which is a flowchart of an exemplary process for using the ML model trained using the modified sequence dataset, in accordance with some embodiments of the present invention. Reference is also made to FIG. 12, which is a block diagram of a system 2000 for generating the modified sequence dataset and/or training the ML model on the modified sequence dataset and/or using the ML model trained on the modified sequence dataset, in accordance with some embodiments of the present invention.

[0440] System 2000 may implement the acts of the method described with reference to FIGS. 9, 10, and/or 11, by processor(s) 2002 of a computing device 2004 executing code instructions 2006A stored in a storage device 2006 (also referred to as a memory and/or program store).

[0441] Computing device 2004 may be implemented as, for example, a client terminal, a server, a computing cloud, a virtual server, a virtual machine, a mobile device, a desktop computer, a thin client, a Smartphone, a Tablet computer, a laptop computer, a wearable computer, glasses computer, and a watch computer.

[0442] Multiple architectures of system 2000 based on computing device 2004 may be implemented. In an exemplary implementation, computing device 2004 storing code 2006A, may be implemented as one or more servers (e.g., network server, web server, a computing cloud, a virtual server) that provides services (e.g., one or more of the acts described with reference to FIG. 9. FIG. 10, and/or FIG. 11) to one or more client terminals 2012 over a network 2014, for example, providing software as a service (SaaS) to the client terminal(s) 2012, providing software services accessible using a software interface (e.g., application programming interface (API), software development kit (SDK)), providing an application for local download to the client terminal(s) 2012, and/or providing functions using a remote access session to the client terminals 2012, such as through a web browser. For example, computing device 2004 generates a modified sequence dataset 2106A, which is used to generate an ML model training dataset 2106B for generating a trained ML model 2106C, as described herein. Multiple users use their respective client terminals 2012 to access computing device 2004, which may be remotely located. Client terminal 2012 provides input data for feeding into the trained ML model 2024 to computing device 2004, for example, via the API, and/or via an application locally installed on client terminal 2012, and/or by another file transfer protocol. Computing device 2004 centrally inputs data 2024 into trained ML model 2016C to generate an outcome, as described herein. Computing device 2004 may provide the outcome of trained ML model 2106C to respective client terminal 2012 (corresponding to each data 2024) for presentation on a display associated with client terminal 2012. In another example, computing device 2004 may include locally stored software (e.g., code 2006A) that performs one or more of the acts described with reference to FIG. 9, FIG. 10, and/or FIG. 11, for example, as a self-contained system such as a laboratory server in communication with MS device 2022. Code 2006A may be implemented as a plug-in and/or additional feature set for integration with existing software that controls MS device 2022.

[0443] Processor(s) 2002 of computing device 2004 may be implemented, for example, as a central processing unit(s) (CPU), a graphics processing unit(s) (GPU), field programmable gate array(s) (FPGA), digital signal processor(s) (DSP), and application specific integrated circuit(s) (ASIC). Processor(s) 2002 may include multiple processors (homogenous or heterogeneous) arranged for parallel processing, as clusters and/or as one or more multi core processing devices. Processor(s) 2002 may be arranged as a distributed processing architecture, for example, in a computing cloud, and/or using multiple computing devices. Processor(s) 2002 may include a single processor, where optionally, the single processor may be virtualized into multiple virtual processors for parallel processing, as described herein.

[0444] Data storage device 2006 stores code instructions executable by processor(s) 2002, for example, a random access memory (RAM), read-only memory (ROM), and/or a storage device, for example, non-volatile memory, magnetic media, semiconductor memory devices, hard drive, removable storage, and optical media (e.g., DVD, CD-ROM). Storage device 2006 stores code 2006A that implements one or more features and/or acts of the method described with reference to FIG. 9, FIG. 10, and/or FIG. 11 when executed by processor(s) 2002.

[0445] Computing device 2004 may include a data repository 2016 for storing data, for example, storing one or more of a modified sequence dataset 2016A generated as described with reference to FIG. 9 and/or including data as described herein, ML model training dataset 2016B created from modified sequence dataset 2016A as described herein, and/or trained ML model 2016C created as described with reference to FIG. 10 and/or used as described with reference to FIG. 11. Data repository 2016 may be implemented as, for example, a memory, a local hard-drive, virtual storage, a removable storage unit, an optical disk, a storage device, and/or as a remote server and/or computing cloud (e.g., accessed using a network connection).

[0446] Computing device 2004 may include a network interface 2018 for connecting to network 2014, for example, one or more of, a network interface card, a wireless interface to connect to a wireless network, a physical interface for connecting to a cable for network connectivity, a virtual interface implemented in software, network communication software providing higher layers of network connectivity, and/or other implementations.

[0447] Network 2014 may be implemented as, for example, the internet, a local area network, a virtual private network, a wireless network, a cellular network, a local bus, a point to point link (e.g., wired), and/or combinations of the aforementioned.

[0448] Computing device 2004 may connect using network 2014 (or another communication channel, such as through a direct link (e.g., cable, wireless) and/or indirect link (e.g., via an intermediary computing unit such as a server, and/or via a storage device) with one or more of:
[0449] Server(s) 2020 storing one or more dataset(s) 2020A, for example, a MS dataset obtained from a sample of cells associated with a target disease for treatment, a reference sequence dataset storing amino acid sequences of proteins, a variable modification dataset storing modifications each including a respective amino acid and expected mast shift, and a dataset of known PSM of healthy cells and cells with the target disease, as described herein.
[0450] Mass spectrometry (MS) device 2022 that generates spectra data elements, as described herein.
[0451] Client terminals 2012, which may provide data for input 2024 into trained ML model 2016C, as described herein.

[0452] Computing device 2004 and/or client terminal(s) 2012 include and/or are in communication with one or more physical user interfaces 2008 that include a mechanism for a user to enter data (e.g., provide the data 2024 for input into trained ML model 2016C) and/or view the displayed outcome of ML model 2016C, optionally within a GUI. Exemplary user interfaces 2008 include, for example, one or more of, a touchscreen, a display, a keyboard, a mouse, and voice activated software using speakers and microphone.

[0453] Referring now back to FIG. 9, at 3002, a reference sequence dataset storing amino acid sequences of proteins is received. The proteome reference sequence file may be represented, for example, in the fasta format.

[0454] At 3003, a variable modification dataset storing multiple modifications each including a respective amino acid and expected mast shift is received.

[0455] At 3004, a mass spectrometry (MS) dataset obtained from a sample of cells associated with a target disease for treatment is received. Target diseases may be, for example cancer, autoimmune related diseases (e.g., Crohn's, arthritis), and others, as described herein. The MS dataset includes spectra data elements outputted by a MS device analyzing MHC bound peptides to generate amino acid sequences. The peptides may be generated by cleaving proteins using one or more enzymes, which may not be known, for example, including and/or excluding trypsin. Each spectra data element is for a respective amino acid sequence of the MHC bound peptides. The spectra data elements may be represented, for example, as MS raw files such as in the mzML format.

[0456] At 3005, multiple combinations are generated. Each combination includes a respective amino acid sequence selected from the reference sequence dataset and at least one modification selected from the variable modification dataset.

[0457] At 3006, a search is performed in parallel, using multiple parallel processors, for example, as described with reference to 3006A-C. The search may be divided so that each processor searches through a different search space. The spectra data elements may be divided so that each processor searches a different subset of the spectra data elements. Each processor may search its subset of the spectra data elements on the entire set of generated combination, and/or on a subset of the generated combinations.

[0458] Optionally, each processor searches for a respective spectra element of the multiple combinations to identify a set of best peptide to spectra matches (PSMs). Each respective processor assigns a ranking score to the respective PSM according to the respective search performed by the respective processor. It is noted that the technical problem described herein of creating a main PSM list arises since each processor assigns its own ranking score based on its own search, which is performed using different data. The spectra element(s) searched by each processor, may be conceptually through of a puzzle of MHC bound proteins that are cleaved to generate puzzle pieces of the peptides. Each processor searches the puzzle pieces, which makes it technically challenging to arrange the puzzle pieces together without knowing what the puzzle (i.e., protein) is. In other words, the parallel processing is not simply taking a search query and dividing the search task into parallel processing, but taking the search query, splitting it up into different components, and then searching the components without necessarily knowing what the original search query is.

[0459] At 3006A, a respective subset of the combinations (or all combinations) may be allocated to processors connected for parallel processing, where each respective processor searches its respective allocated spectra elements on the respective subset of (or all) combinations to identify a respective set of PSM.

[0460] A single search task may be distributed into thousands of instances that are performed in parallel on a CPU cluster, for example, a search process that creates all the possible peptide candidates from a given reference sequence (in-silico digestion), converts them to a theoretical spectrum, compares them to the experimental spectra and calculates a matching score, for example, MSFragger, for example, as described with reference to Andy T. Kong1, 2, Felipe V. Leprevost2. Dmitry M. Avtononmov2, D. M. & Nesvizhskii, and A. I. MSFragger: ultrafast and comprehensive peptide identification in shotgun proteomics. 14, 39-46 (2017). The search tasks may be split by dividing the search into batches and the list of variable modifications into each potential combination up to, for example, 5, 6, 7, 8, or other number of mass shifts per instance.

[0461] At 3006B, the respective set of PSM of each respective processor is merged to create a PSM aggregation dataset.

[0462] As discussed herein, merging the PSM datasets is a technical challenge, where for example, statistical parameters used in a subsequent false discovery rate (FDR) calculation feature (e.g., as described with reference to 3008A) are distorted by multiple searches of a same reference dataset over different software instances executed by the multiple parallel connected processors. To address this technical challenge, in at least some implementations, the merge process uses unmodified hits combined histogram to evaluate the number of duplicated hits and remove the duplicates. The merge process may recalculate the expectation based on the restored score histogram for each PSM. The merge process aggregates the individual search results to help assure accurate FDR calculation in the prioritizing stage (e.g., feature 3008).

[0463] The merging may be performed by removing duplicated PSM from the PSM aggregation dataset, for example, by using unmodified hits combined histogram to evaluate a number of duplicated PSM and identify the duplicated PSM for removal thereof. An expectation based on a restored score histogram for each PSM is recalculated. The merge process assembles the different output results obtained from each process executing on each parallel connected processor, prioritizing the best peptide to spectra match (PSM) solution, for example, according to its hyperscore and/or minimum delta masses.

[0464] At 3006C, the PSMs results from the processors connected in parallel are aggregated to generate a main PSM list with main ranking score. The main PSM list may be generated by computing the main ranking score from the ranking score of each respective PSM of each respective search performed by each respective parallel connected processor. Highest ranking PSMs are selected according to respective main ranking scores.

[0465] The highest ranking PSMs may be selected from the PSM aggregation dataset, for example, PSMs above a selected threshold and/or a top number of PSMs (e.g., top 100, or 500, or 1000 or other number), and/or top percentage of PSMs (e.g., top 1%, or 5%, or 10%, or other percentage).

[0466] At 3008, an optional prioritization process, including one or more optional features, is executed. The highest ranking PSMs may be further prioritized for inclusion in the modified sequence dataset.

[0467] The prioritization process collects a set of quality assignment measurements and uses the set of quality assignment measures to filter ambiguous assignments and potentially false identifications, for example, as described with reference to 3008A-E. It is noted that one or more of 3008A-E may be included and/or excluded from the process.

[0468] Multiple quality assignment measures may be computed, and one or more of the following may be performed using the quality assignment measures: validating the PTM of each member of the PSM aggregation dataset according to the quality measures, filtering ambiguous assignments and isobaric decoys of the PSM aggregation dataset according to a filtering threshold, ranking members of the PSM aggregation dataset, and selecting the highest ranking PSMs according to the highest ranked member of the PSM aggregation dataset.

[0469] At 3008A, probabilities may be computed for each PSM based on the expectation score recalculate in the merge feature 3006B, for example, using Peptideprophet (e.g., as described with reference to Keller. A., Nesvizhskii, A. I., Kolker, E. & Aebersold, R. Empirical statistical model to estimate the accuracy of peptide identifications made by MS/MS and database search. Anal. Chem. 74, 5383-5392 (2002)) and/or another suitable process. Optionally, a probability score indicative of match accuracy is computed for each PSM.

[0470] Optionally, the PSM aggregation dataset is divided into groups, for example, unmodified, standard search modification types, and other modification types. The division into groups may be using a threshold cutoff based on respective abundance in the PSM aggregation dataset. For each group, the PSM are sorted by probability score, and a threshold may be set for assuring false identification is below a selected FDR limit, for example, about 3%, 5%, 7%, or other value.

[0471] Optionally, the highest ranking PSMs are selected according to highest probability. When a difference in probability scores is below a defined percentage of the average probability score, the lower-ranked PSM are obtained and added to the modified sequence dataset. A certain PSM may be identified as the highest ranking PSM when the certain PSM is identified as having a highest probability score in one respective set of PSM and a lower ranked probability score in another respective set of PSM.

[0472] Optionally, spectra are annotated. Peaks are extracted from the PSM. For each peak, multiple theoretical fragment ions for an unmodified version of the respective peptide are computed. Each theoretical fragment ion is adjusted according to the modification mass shift. The respective peak is annotated with the theoretical fragment ions. Exemplary theoretical fragment ions include a, b, y precursor and/or diagnostic ions with potential ammonium and water lost in expected peptide charges.

[0473] Optionally, for each PSM, a searching for modification reporter ions is performed. A number of b and y ions are provided. A proportion of ion current (PIC) is computed. Unassigned peaks with significant intensity indicate a discrepancy between an observed spectrum defined by the respective spectra element of the plurality of PSMs and a matched peptide of the PSM.

[0474] In an exemplary implementation, the Philosopher package (e.g., as described with reference to Leprevost Felipe da Veiga, Haynes Sarah, N. A. Philosopher|A complete toolkit for shotgun proteomics data analysis. Nat. Methods doi:10.1038/s41592-020-0912-y) uses a target-decoy strategy to filter the data generating a combined PSM list for performing FDR calculations (e.g., psm.tsv). The FDR may be set to a suitable value, for example, about 3%, 5%, 7%, or other value, using a subgroup FDR threshold model where identified peptides were split into 3 groups: unmodified, highly abundant modifications and rare modifications. Alternative models for FDR correction may be used, such as for the case of PTM discovery, for example, as descried with reference to Devabhaktuni, A. et al. TagGraph reveals vast protein modification landscapes from large tandem mass spectrometry datasets. Nat. Biotechnol. 37, (2019), Fu. Y. & Qian, X. Transferred Subgroup False Discovery Rate for Rare Post-translational Modifications Detected by Mass Spectrometry <sup/>. Mol. Cell. Proteomics 13, 1359-1368 (2014), and/or n, Z. et al. PTMiner: Localization and quality control of protein modifications detected in an open search and its application to comprehensive post-translational modification characterization in human proteome. Mol. Cell. Proteomics 18, 391-405 (2019). For example, a global FDR may be performed without separating peptides into groups, which do not bias against rare modification types but increase false-positive rates. Alternatively or additionally, other decoy-independent models which avoid FDR entirely may be used, for example, as described with reference to Devabhaktuni, A. et al. TagGraph reveals vast protein modification landscapes from large tandem mass spectrometry datasets. Nat. Biotechnol. 37, (2019). In some embodiments, the choice for a highly stringent FDR increases confidence in the accuracy of identifications.

[0475] Optionally, for each spectrum assigned to a modified peptide, differences in scores (e.g., delta hyperscore) between the top-ranking peptide (with modification) and lower-ranked candidates are extracted from the dataset (e.g., psm file). For ambiguous matches, where the score differences are below about 3%, 5%, or 7%, or other value of the average score (e.g., delta score=1), the lower-ranked identifications (e.g., as documented in the MSFragger output files, pepXML) may be extracted. Those identifications are then considered as the potential hits for the following features of the process. Otherwise, only the leading match is used.

[0476] Optionally, the peak lists for each PSM is obtained, for example, from the MS raw file. A process, for example, CRUX (e.g., as described with reference to Park, C. Y., Klammer, A. A., Käli, L., MacCoss, M. J. & Noble, W. S. Rapid and accurate peptide identification from tandem mass spectra. J. Proteome Res. 7, 3022-3027 (2008)) version 3.1 or other suitable process, is used to create (e.g., all) possible theoretical fragment ions for the unmodified version of the peptide and adjust them according to the modification mass shift. The ion list may be much more comprehensive than what the matching process (e.g., MSFragger) uses, by optionally contains a, b, y, precursor, internal fragments and/or diagnostic ions with potential ammonium and water lost in all expected peptide charges. The list may then be used to annotate the spectrum peaks. A search for modification reporter ions (e.g., as described with reference to Kuster, B. ProteomeTools: Systematic characterization of 21 post-translational protein modifications by LC-MS/MS using synthetic peptides. (2018)) may be performed. For each PSM, the number of b and y ions may be reported and/or the proportion of ion current (PIC) may be calculated. Unassigned peaks with significant intensity may suggest a discrepancy between the observed spectrum and the matched peptide, and as such may be reported.

[0477] At 3008B, for each PTM of each PSM, a window of potential site positions may be created based on the annotated peaks. It is noted that the annotation may be performed in 3008A and/or in 3008B. Alternatively or additionally, site positions may be considered within the position window and/or alternative combination of modification with equivalent mass may be considered (e.g., two methyls are equivalent to a dimethyl, two glycine tails on two lysines are equivalent to a diglycine on one lysine). Potential site positions (e.g., all potential site positions) and/or alternative configurations may be reported, for example, presented on a display, and/or stored in an execution log file.

[0478] At 3008C, a search may be performed for identical masses and/or combination of masses that match the respective PTM mass shift indicative of mass decoy and/or isobaric masses. For each identified PTM an alternative solution may be considered by searching for identical masses and/or combination of masses that match the modification mass shift. For example, residues located before or after the identified peptide sequence may be identical in mass to predicted modification mass shifts and cause the matching process to falsely assign them as modifications at the peptide terminus instead of a longer peptide. Isobaric masses based on peptide amino acid sequence alone may be considered potential decoy and in most analysis, the PSM is filtered out as ambiguous. In response to finding the identical masses and/or combination of masses, the ambiguous respective identified PSM corresponding to the respective PTM may be removed from further consideration and/or further processing, i.e., are excluded from the PSM aggregation dataset.

[0479] Optionally, PSM with total peptide mass greater than average mass of a maximum peptide length plus a tolerance value are excluded from further consideration and/or further processing, i.e., are excluded from the PSM aggregation dataset. The exclude may be due to the technical problem of the search space having a defined limit for peptide length, which may result in incorrect assignments when a contaminant with a mass higher than max peptide is assigned to a peptide with a high mass shift modification. During the search for PTMs with large mass shifts (e.g., ubiquitin tail with 4 amino acid GGRL—383.228103 Da), this may lead to mis-assigned spectra. When the longer peptide is not part of the search space, a better match existing cannot be ruled out and/or that there is a higher scoring match above length limit cannot be ruled out. Therefore, potential mis-assignments may be filtered out by limiting the total peptide mass to the average mass of max peptide length plus 100 Da.

[0480] At 3008D, for each respective PSM, a dataset of known PSM (e.g., of healthy cells and/or cells with the target disease) may be search for a match to determine when the respective PTM site was reported before. Examples of known PSM databases include dbPTM (e.g., as described with reference to Huang, K.-Y. et al, dbPTM 2016: 10-year anniversary of a resource for post-translational modification of proteins. Nucleic Acids Res. 44, D435-D446 (2016)) and PhosphoSitePlus (e.g., as described with reference to Hornbeck, P. V. et al. PhosphoSilePlus, 2014: mutations, PTMs and recalibrations. Nucleic Acids Res. 43, D512-D520 (2015)) databases. Likelihood of the respective PSM being included in the modified sequence dataset is increased when the PSM is found in the dataset of known PSM.

[0481] At 3008E, the information collected in the prioritizing feature (e.g., 3008) may be integrated into a weighted score formula that ranks the identifications by their quality assessment. A threshold may be set to determine decoys modifications, which may be filtered out from the final identification list.

[0482] Optionally, one or two types of enrichment steps between samples may be implemented. In a rank base enrichment step, when a modified peptide is identified in rank 1 (e.g., top ranked) in at list one sample, any lower rank identification in other samples may be considered a valid hit. In a global FDR enrichment, when a modified peptide successfully passes the sub-group FDR threshold in one sample—any similar identification in other samples that pass the global FDR threshold will be considered a valid hit.

[0483] At 3010, modified sequences each including the PTM and sequences corresponding to the selected highest ranking PSMs, optionally after the prioritization process, are included in a modified sequence dataset. The modified sequence dataset stores an indication of binding motifs defined by identified PTM and corresponding sequence.

[0484] Optionally, the modified sequence dataset stores peptides selected from the group consisting of SEQ ID NO: 1-10746, 10817, 10819, 10820, 10823, 10824, 10826 and 10827, as described herein.

[0485] The modified sequence dataset is provided, for example, presented on a display, stored on a data storage device, forwarded to another device (e.g., server, storage), and/or provided to another process for further processing (e.g., to create the training dataset and/or for training the ML model as described herein).

[0486] The modified sequence dataset may be provided for selecting a certain binding motif having a certain PTM and corresponding amino acid sequence. The selected binding motif is capable of specifically binding an MHC (e.g. HLA I) presented peptide for treatment of the target disease.

[0487] Referring now back to FIG. 10, at 3102, the modified sequence dataset is received and/or generated. The modified sequence dataset may be generated, for example, as described with reference to FIG. 9.

[0488] At 3104, a training dataset may be created, by labelling each modified sequence of the modified sequence dataset with an indication of one or more of: an MHC type, parent gene, and position of the motif within a full protein length. Each modified sequence is for each respective motif of the modified sequence dataset. Each modified sequence including an amino acid sequence. PTM type, and position of the PTM on the amino acid sequence.

[0489] At 3106, training a machine learning model using the training dataset.

[0490] At 3108, the ML model is provided.

[0491] Optionally, for an input of a certain modified sequence defined by a combination of an amino acid sequence and at least one PTM that is fed into the trained ML model, an indication of whether the certain modified sequence is predicted to fit a binding motif that binds to a cell of the MHC type is obtained as an outcome of the ML model. Alternatively or additionally, for an input of an amino acid sequence of a full protein length and PTMs into the ML model, at least one modified sequence predicted to fit a binding motif is obtained as an outcome of the ML model.

[0492] Referring now back to FIG. 11, at 3202 the trained ML model is provided and/or generated.

[0493] At 3204, receiving an input is received, where the input is one or both of: (i) a certain modified sequence defined by an amino acid sequence and a PTM, and (ii) an amino acid sequence of a full protein length and PTMs.

[0494] At 3206, the input is fed into the trained ML model.

[0495] At 3208, an outcome of the ML model is obtained in response to the input. For the input of (i) a certain modified sequence defined by an amino acid sequence and a PTM, an outcome of an indication of whether the certain modified sequence is predicted to fit a motif that binds to a cell of the MHC type is obtained. For the input of (ii) an amino acid sequence of a full protein length and PTMs, an outcome of at least one motif predicted to be created from the full protein length and PTMs is obtained.

[0496] At 3210, the subject may be treated using the motif predicted to bind to a cell of the MHC type and/or the motif predicted to be created from the full protein length.

[0497] Various embodiments and aspects of the present invention as delineated hereinabove and as claimed in the claims section below find experimental and/or computational support in the following examples.

### EXAMPLES

[0498] Reference is now made to the following examples, which together with the above descriptions illustrate some embodiments of the invention in a non limiting fashion.

[0499] Inventors compared three different proteomics pipelines: 1) MaxQuant (e.g., as described with reference to Cox, J., Michalski, A. & Mann, M. Software Lock Mass by Two-Dimensional Minimization of Peptide Mass Errors. J. Am. Soc. Mass Spectrom. 22, 1373-1380 (2011)) version 1.6.0.16 2) MSFragger version 20180316+Philosopher version 20180924 3) And a pipeline based on embodiments described herein that implement MSFragger version 20180316 and Philosopher version 20180924.

[0500] For a search including phosphorylation site on S, T, or Y of endogenous peptides (search space of ˜31 billion potential peptides). MaxQuant arrived at search results within a week while the pipeline based on embodiments described herein produced its result in ˜2 hours.

[0501] Table 1 below presents results of the computational experiment comparing different computational process to the parallel processor based computational process described herein, in accordance with some embodiments of the present invention. Where:
[0502] (1) (2) denote Cell line HEK293, 3 replicas are without treatment, 3 replicas were stimulated with INF+TNF, for more information see Wolf-Levy. H. et al. Revealing the cellular degradome by mass spectrometry analysis of proteasome-cleaved peptides. Nat. Biotechnol. (2018), doi:10.1038/nbt.4279.
[0503] (3) denotes Multiple cancer cell lines HLA class I data, taken from Bassani-Sternberg, M., Pletscher-Frankild, S., Jensen, L. J. & Mann. M. Mass Spectrometry of Human Leukocyte Antigen Class I Peptidomes Reveals Strong Effects of Protein Abundance and Turnover on Antigen Presentation. Mol. Cell. Proteomics 14, 658-673 (2015).
[0504] (4) denotes that as reference data, the SwissProt database from UniProtKB, downloaded on the 19 Sep. 2018 without isoform (20,394 sequences), Contaminate data taken from MaxQuant version 1.6.0.16 with additional three entries for protein G and mAb that the MAPP protocol uses (248 sequences)
[0505] (5) denotes MaxQuant run on window server, 64-bit OS, with Intel Xeon CPU E5-2699 v4 @ 2.20 GHz (6 processors) with 64 GB RAM
[0506] (6) denotes MSFragger+Philosopher run on Linux system: HP type C, 896 GPU cores. GBU: Tesla 52050.

[0507] As used herein the term “about” refers to ±10%.

[0508] The terms “comprises”. “comprising”. “includes”, “including”. “having” and their conjugates mean “including but not limited to”.

[0509] The term “consisting of” means “including and limited to”.

[0510] The term “consisting essentially of” means that the composition, method or structure may include additional ingredients, steps and/or parts, but only if the additional ingredients, steps and/or parts do not materially alter the basic and novel characteristics of the claimed composition, method or structure.

[0511] As used herein, the singular form “a”. “an” and “the” include plural references unless the context clearly dictates otherwise. For example, the term “a compound” or “at least one compound” may include a plurality of compounds, including mixtures thereof.

[0512] Throughout this application, various embodiments of this invention may be presented in a range format. It should be understood that the description in range format is merely for convenience and brevity and should not be construed as an inflexible limitation on the scope of the invention. Accordingly, the description of a range should be considered to have specifically disclosed all the possible subranges as well as individual numerical values within that range. For example, description of a range such as from 1 to 6 should be considered to have specifically disclosed subranges such as from 1 to 3, from 1 to 4, from 1 to 5, from 2 to 4, from 2 to 6, from 3 to 6 etc., as well as individual numbers within that range, for example, 1, 2, 3, 4, 5, and 6. This applies regardless of the breadth of the range.

[0513] Whenever a numerical range is indicated herein, it is meant to include any cited numeral (fractional or integral) within the indicated range. The phrases “ranging/ranges between” a first indicate number and a second indicate number and “ranging/ranges from” a first indicate number “to” a second indicate number are used herein interchangeably and are meant to include the first and second indicated numbers and all the fractional and integral numerals therebetween.

[0514] As used herein the term “method” refers to manners, means, techniques and procedures for accomplishing a given task including, but not limited to, those manners, means, techniques and procedures either known to, or readily developed from known manners, means, techniques and procedures by practitioners of the chemical, pharmacological, biological, biochemical and medical arts.

[0515] When reference is made to particular sequence listings, such reference is to be understood to also encompass sequences that substantially correspond to its complementary sequence as including minor sequence variations, resulting from, e.g., sequencing errors, cloning errors, or other alterations resulting in base substitution, base deletion or base addition, provided that the frequency of such variations is less than 1 in 50 nucleotides, alternatively, less than 1 in 100 nucleotides, alternatively, less than 1 in 200 nucleotides, alternatively, less than 1 in 500 nucleotides, alternatively, less than 1 in 1000 nucleotides, alternatively, less than 1 in 5,000 nucleotides, alternatively, less than 1 in 10,000 nucleotides.

[0516] It is appreciated that certain features of the invention, which are, for clarity, described in the context of separate embodiments, may also be provided in combination in a single embodiment. Conversely, various features of the invention, which are, for brevity, described in the context of a single embodiment, may also be provided separately or in any suitable subcombination or as suitable in any other described embodiment of the invention. Certain features described in the context of various embodiments are not to be considered essential features of those embodiments, unless the embodiment is inoperative without those elements.

[0517] Various embodiments and aspects of the present invention as delineated hereinabove and as claimed in the claims section below find experimental support in the following examples.

### EXAMPLES

[0518] Reference is now made to the following examples, which together with the above descriptions illustrate some embodiments of the invention in a non limiting fashion.

[0519] Generally, the nomenclature used herein and the laboratory procedures utilized in the present invention include molecular, biochemical, microbiological and recombinant DNA techniques. Such techniques are thoroughly explained in the literature. See, for example, “Molecular Cloning: A laboratory Manual” Sambrook et al., (1989); “Current Protocols in Molecular Biology” Volumes I-III Ausubel, R. M., ed. (1994); Ausubel et al., “Current Protocols in Molecular Biology”, John Wiley and Sons, Baltimore, Maryland (1989); Perbal, “A Practical Guide to Molecular Cloning”. John Wiley & Sons, New York (1988); Watson et al., “Recombinant DNA”, Scientific American Books, New York; Birren et al. (eds) “Genome Analysis: A Laboratory Manual Series”. Vols. 1-4, Cold Spring Harbor Laboratory Press. New York (1998); methodologies as set forth in U.S. Pat. Nos. 4,666,828; 4,683,202; 4,801,531; 5,192,659 and 5,272,057; “Cell Biology: A Laboratory Handbook”. Volumes I-III Cellis, J. E., ed. (1994); “Culture of Animal Cells—A Manual of Basic Technique” by Freshney, Wiley-Liss, N. Y. (1994), Third Edition; “Current Protocols in Immunology” Volumes I-III Coligan J. E., ed. (1994); Stites et al. (eds), “Basic and Clinical Immunology” (8th Edition). Appleton & Lange. Norwalk, C T (1994); Mishell and Shiigi (eds). “Selected Methods in Cellular Immunology”. W. H. Freeman and Co., New York (1980); available immunoassays are extensively described in the patent and scientific literature, see, for example, U.S. Pat. Nos. 3,791,932; 3,839,153; 3,850,752; 3,850,578; 3,853,987; 3,867,517; 3,879,262; 3,901,654; 3,935,074; 3,984,533; 3,996,345; 4,034,074; 4,098,876; 4,879,219; 5,011,771 and 5,281,521; “Oligonucleotide Synthesis” Gait, M. J., ed. (1984); “Nucleic Acid Hybridization” Hames. B. D., and Higgins S. J., eds. (1985); “Transcription and Translation” Hames, B. D., and Higgins S. J., eds. (1984); “Animal Cell Culture” Freshney, R. I., ed. (1986); “Immobilized Cells and Enzymes” IRL Press. (1986); “A Practical Guide to Molecular Cloning” Perbal. B., (1984) and “Methods in Enzymology” Vol. 1-317, Academic Press; “PCR Protocols: A Guide To Methods And Applications”, Academic Press. San Diego, C A (1990); Marshak et al., “Strategies for Protein Purification and Characterization—A Laboratory Course Manual” CSHL Press (1996); all of which are incorporated by reference as if fully set forth herein. Other general references are provided throughout this document. The procedures therein are believed to be well known in the art and are provided for the convenience of the reader. All the information contained therein is incorporated herein by reference.

### Materials and Methods

[0520] PROtein Modification Integrated Search Engine (PROMISE)—To overcome the challenges of searching for post translational modifications (PTMs) on endogenous peptides in a systematic manner and optimize search efficiency, the present inventors have developed a PROtein Modification Integrated Search Engine (PROMISE). Specifically, this computational pipeline (FIG. 7) was developed to improve spectral assignment rates in mass spectrometry (MS) data of endogenous peptides. This was accomplished by including proteoforms with PTMs in the peptide search space. PROMISE has two stages: a) a matching phase and b) a prioritizing phase (supplementary pipeline documentation). The matching phase reduces the algorithm running time, utilizing the ultrafast MSFragger³⁷ software and parallel computing on a CPU cluster. The prioritizing phase includes several computational steps to distinguish between true and false hits, validate PTM identifications and site position and rank predictions by their biological relevance and antigenic potential. The pipeline was coded in Python 2.7.

[0521] Matching phase—The program accepts MS raw files (mzML format), proteome reference sequence file (fasta format) and a list of variable modifications (amino acid and the expected mass shift) as inputs. A single search task can be distributed into thousands of MSFragger [Andy T. et al. MSFragger: ultrafast and comprehensive peptide identification in shotgun proteomics. 14, 39-46 (2017)] instances that are performed in parallel on a CPU cluster. The search tasks are split by dividing the search into batches and the list of variable modifications into each potential combination up to 7 mass shifts per instance. A merge program then assembles the different output results, prioritizing the best peptide to spectra match (PSM) solution according to its hyperseore and minimum delta masses. It also recalculates the statistical parameters needed for further FDR calculation.

[0522] Prioritization phase—The pipeline uses Peptideprophet [Keller, A., et al. Anal. Chem. 74, 5383-5392 (2002)] to compute probabilities for each PSM. The Philosopher package (www(dot)philosopher(dot)nesvilab(dot)org/) uses a target-decoy strategy to filter the data generating a combined PSM list (psm.tsv). For the analysis presented hereinbelow, a subgroup FDR whereby the identifications was split into three groups was used: unmodified, standard search modification types (n-acetylation and methionine oxidation) and the other modification types. Cutoff was set to 5%. In cases where subgroup FDR was used across multiple cohorts, any peptide that passed the subgroup FDR in at least one cohort was included. Alternative models exist for FDR correction, specifically in the case of PTM discovery [Devabhaktuni. A. et al. Nat. Biotechnol. 37, 469-479 (2019); Fu, Y. & Qian, X. Mol. Cell. Proteomics 13, 1359-1368 (2014); An, Z. et al. Mol. Cell. Proteomics 18, 391-405 (2019)]. For example, one can perform a global FDR without separating peptides into groups, which do not bias against rare modification types but increases false positive rates. Likewise, there are newer decoy-independent models which avoid FDR entirely [Devabhaktuni. A. et al. Nat. Biotechnol. 37, 469-479 (2019)]. Here the choice for a highly stringent FDR increases confidence in the accuracy of identifications.

[0523] For each spectrum assigned to a modified peptide, differences in scores (delta hyperscore) between the top-ranking peptide (with modification) and lower-ranked candidates are extracted from the psm file. For ambiguous matches, where the score differences are below 5% of the average score (delta score=1), the program retrieves the lower-ranked identifications as documented in the MSFragger output files (pepXML). Those identifications are then considered as the potential hits for the following steps of analysis. Otherwise, only the leading match is used.

[0524] Spectrum annotation: The program retrieves the peak lists for each PSM from the MS raw file. It uses CRUX [Park, C. Y., et al. J. Proteome Res. 7, 3022-3027 (2008)] version 3.1 to create all possible theoretical fragment ions for the unmodified version of the peptide and adjust them according to the modification mass shift. The ion list is much more comprehensive than what MSFragger uses in its matching algorithm and contains a, b, y, precursor and diagnostic ions with potential ammonium and water lost in all expected peptide charges. The list is then used to annotate the spectrum peaks. The program also searches for modification reporter ions [Kuster, B. ProteomeTools: Systematic characterization of 21 post-translational protein modifications by LC-MS/MS using synthetic peptides. (2018)]. For each PSM, the number of b and y ions will be reported and the proportion of ion current (PIC) is calculated. Unassigned peaks with significant intensity suggest a discrepancy between the observed spectrum and the matched peptide, and as such will be reported.

[0525] PTM localization: For each modification, a window of potential site positions is created based on the annotated peaks from the previous step. Alternative site positions are considered within the position window and alternative combination of modification with equivalent mass are also considered (e.g. two methyls are equivalent to a dimethyl, two glycine tails on two lysines are equivalent to a diglycine on one lysine). All potential site positions and alternative configurations are reported.

[0526] Search for mass decoys or isobaric masses: For each identified PTM an alternative solution is considered by searching for identical masses or combination of masses that match the modification mass shift. For example, residues located before or after the identified peptide sequence can be identical in mass to predicted modification mass shifts and cause the matching algorithm to falsely assign them as modifications at the peptide terminus instead of a longer peptide. Isobaric masses based on peptide amino acid sequence alone are considered potential decoy and in most analysis, the PSM will be filtered out as ambiguous.

[0527] Known site search: The program scans dbPTM [Huang, K.-Y. et al. Nucleic Acids Res. 44, D435-D446 (2016)] and PhosphoSitePlus [Hornbeck. P. V. et al. Nucleic Acids Res. 43, D512-D520 (2015)] databases to determine if the PTM site was reported before. The results of the search are documented in the final output report.

[0528] Performance—To evaluate pipeline performance, the full human proteome from UniProtKB was used as reference data and endogenous proteasome-cleaved peptides⁶⁰ (length between 6 and 40 amino acids) with 5 variable modifications were searched for, creating a search space of ˜31 billion potential peptides. In a comparison of PROMISE to MaxQuant³⁸ (see table 1 hereinbelow), it was found that the former reached results in around two hours (1:55 hours) while MaxQuant produced its result in around a week (169:50 hours). To assess the reproducibility of the identified peptides by the distributed version and the standalone one the spectral assignments from identical sets of data were compared, indicating that 99.2% were identical.

TABLE 1
PROMISE pipeline performance comparison to MSFragger and MaxQuant

| | | | | | | | | | MSFragger + | | | |
|---|---|---|---|---|---|---|---|---|---|---|---|---|
| | | | | | | | | | Philosopher | | | |
| | | | | | | | MaxQuant | | Standalone | | PROMISE | |
| | | | | | | Theoretical | | PSM | | PSM | | PSM |
| | | | | | | peptides | | Peptides | | Peptides | | Peptides |
| | | | | | | (search | Running | Proteins | Running | Proteins | Running | Proteins |
| | | | | | Peptide | space) | time | (FDR = | time | (FDR = | time | (FDR = |
| | digestion | Data | MS/MS | Modification | length | (Millions) ⁽⁴⁾ | (H) ⁽⁵⁾ | 0.01) | (H) ⁽⁶⁾ | 0.01) | (H) ⁽⁶⁾ | 0.01) |
| 1 | tryptic | HEK293 ⁽²⁾ | 276,149 | Oxidized | 6-40 | 4.44 | 3:10 | 156,723 | 0:58 | 162,137 | 0:48 | 161,231 |
| | | | | Methionine + N | | | | (57%) | | (59%) | | (58%) |
| | | | | terminus | | | | 32,801 | | 30,931 | | 31,134 |
| | | | | acetylation | | | | 4,967 | | 5,290 | | 5,286 |
| 2 | tryptic | HEK293 ⁽²⁾ | 276,149 | Oxidized | 6-40 | 81.23 | 7:18 | 156,772 | 1:15 | 161,314 | 1:10 | 159,897 |
| | | | | Methionine + N | | | | (57%) | | (58%) | | (58%) |
| | | | | terminus | | | | 32,779 | | 30,748 | | 30,959 |
| | | | | acetylation + | | | | 4,921 | | 5289 | | 5273 |
| | | | | phosphorylation | | | | | | | | |
| | | | | on STY | | | | | | | | |
| 3 | Non- | MAPP- | 137,241 | Oxidized | 6-40 | 1,219.28 | 20:09 | 29,632 | Not tested | | 0:18 | 31,476 |
| | specific | HEK293 ⁽¹⁾ | | Methionine + N | | | | (22%) | | | | (23%) |
| | | | | terminus | | | | 7472 | | | | 9068 |
| | | | | acetylation | | | | 1286 | | | | 1503 |
| 4 | Non- | MAPP- | 137,241 | Oxidized | 6-40 | 31,101.01 | 169:50 | 28,096 | Fail (to many | | 1:55 | 33,273 |
| | specific | HEK293 ⁽¹⁾ | | Methionine + N | | | | (20%) | theoretical peptides) | | | (24%) |
| | | | | terminus | | | | 7125 | | | | 7574 |
| | | | | acetylation + | | | | 1233 | | | | 1183 |
| | | | | phosphorylation | | | | | | | | |
| | | | | on STY | | | | | | | | |
| 5 | Non- | HLA- | 1,081,814 | Oxidized | 8-15 | 213.38 | 9:28 | 76,125 | Not tested | | 0:49 | 176,107 |
| | specific | multi | | Methionine + N | | | | (7%) | | | | (16%) |
| | | cell | | terminus | | | | 24,250 | | | | 37,679 |
| | | lines ⁽³⁾ | | acetylation | | | | 8,142 | | | | 10,060 |
| 6 | Non- | HLA- | 1,081,814 | Full list-27 | 8-15 | ~1,000,000 | Not practical | | Fail | | ~48:00 | 142,591 |
| | specific | multi | | modifications () | | | | | | | | (13%) |
| | | cell | | | | | | | | | | 29,586 |
| | | lines ⁽³⁾ | | | | | | | | | | 9615 |

^{(1) (2)} Cell line HEK293, 3 replicas are without treatment, 3 replicas were stimulated with INF + TNF, for more information see Ref ¹⁴
⁽³⁾ Multiple cancer cell lines HLA class I data, taken from Bassani et al ¹⁵
⁽⁴⁾ As reference data, the SwissProt database from UniProtKB, downloaded on the 19 Sep. 2018 without isoform (20,394 sequences), Contaminate data taken from MaxQuant version 1.6.0.16 with additional three entries for protein G and mAb that the MAPP protocol uses (248 sequences)
⁽⁵⁾ MaxQuant run on window server, 64-bit OS, with Intel Xeon CPU E5-2699 v4 @ 2.20 GHz (6 processors) with 64 GB RAM
⁽⁶⁾ MSFragger + Philosopher run on Linux system: HP type C, 896 GPU cores, GBU: Tesla S2050

[0529] Modification Annotation and Classification—In order to assess the effects of modifications in a holistic manner, modifications that may arise during sample processing (“experimental”) were differentiated from biological modifications that reflect the cellular state (“biological”). This was effected using the UNIMOD classification system (unimod.org) which defines modifications as post-translational or multiple (here termed “biological”) or artifact (here termed “experimental”). Including experimental modifications in the search allowed matching spectra to a presented peptide that would otherwise have remained unassigned. However, some of the types of modifications that were termed as experimental also occur biologically. Because they are chemically identical they cannot be distinguished, the present inventors consider that peptides identified with an experimental PTM may exist in the cell in either their modified or unmodified form. Therefore, both the experimental and biological types of modifications were include in the analysis for maximum enrichment of immunopeptide identification. When a peptide contains multiple modification types, a leading modification was defined, prioritizing biological modifications over experimental ones.

[0530] Search mass boundary effect correction—The search space in the analysis is bounded by a 15 amino acid peptide length. This can result in incorrect assignments when a contaminant with a mass higher than 15 AA is assigned to a 15-mer peptide with a high mass shift modification. As we search for PTMs with large mass shifts (e.g. ubiquitin tail with 4 amino acid GGRL—383.228103 Da), this can lead to missasigned spectra. Because the longer peptide is not part of our search space we cannot rule out that a better match exists or that there is a higher scoring match above 15 AA. Therefore, to avoid a bias we filter out potential mis-assignments by limiting the total peptide mass to the average mass of 15 amino acid peptide plus 100 Da when comparing peptide lengths (FIG. 1E).

[0531] HLA motif—HLA I motif presentation was designed to capture both the main anchor position 2 and C-terminus and the TCR recognition area (position 3-7). The presented motif was created by collecting all the epitopes reported for the specific HLA haplotype from the IEDB 4 database. Epitopes with length less than 8 amino acids were discarded. To correct for discrepancies in length, the motif was constructed from positions 1 to 7 starting from the N terminus followed by the C terminus and its preceding position. For 9 mer epitopes, the motif is taken from all 9 positions, for 8-mer epitopes the 7^{th} position is duplicated and presented as both positions 7 and 8/C-1. For epitopes longer than 9 residues, the motif skips positions 8 till C-terminus-1. Motif logos were plotted using Seq2Logo 2.0⁶¹ with default parameters. The comparable motif was created using Two-Sample-Lo⁶².

[0532] Site score—The score was designed to determine if a PTM tends to fall within the peptide anchor positions or the center positions (3-7) of the peptide; by summing up the differences between the distribution values of modified amino acids vs. the background in the anchor positions (2, C-terminus) and subtracting the sum of distribution differences in the center positions (3-7). In this manner, an enrichment in the anchor positions will result in a high positive score while enrichment in the center of the peptide will result in a negative score. In case both the center and anchor positions are enriched or under-represented, the score will be close to zero and the modification tendency cannot be classified to be in a specific area.

[0533] Modeling the Peptide-Receptor Complex—

[0534] General modeling scheme—The FlexPepBind scheme used^{63,64} allows the structure-based evaluation of the relative binding affinities of different peptides for a given receptor, using a solved structure of a representative peptide-protein interaction as template. Structures of peptide-MHC complexes were generated by “threading” candidate peptide sequences onto this template, followed by refinement using Rosetta FlexPepDock⁵⁰. The top-scoring models were selected to discriminate stronger from weaker binders and inspected for the structural details of an interaction.

[0535] Selection of templates for modeling—For each of the MHC alleles (receptors) and peptides, different available PDB structures we evaluated to serve as templates for the modeling of the structure and relative binding affinities of different peptides. Screening for relevant PDB templates was guided by 3 main requirements: (1) matching MHC allele, (2) matching peptide length, and (3) similarity of peptide anchor residues. Specifically, for peptide K(ac)P(ox)SLEQSPAVL (SEQ ID NO: 10817 having the recited modifications) bound to HLA-A02 (FIG. 3F) PDB id 5D9S⁶⁵ [HLA-A02 bound to FVLELEPEWTV (SEQ ID NO: 10828)] was used; for peptide KP(ox)LKVIFV (SEQ ID NO: 10827 having the recited modification) bound to HLA-A02 (FIG. 5), the peptide backbone from PDB id 4F7T⁶⁶ [HLA-A24 bound to RYGFVANF (SEQ ID NO: 10829)] and the same MHC receptor structure (from PDB id 5D9S) were used; for peptide MPTLPPYQ(me) (SEQ ID NO: 10818 having the recited modification) bound to HLA-B54 (FIG. 3G), PDB id 3BWA⁶⁷ [HLA-B35 bound to FPTKDVAL (SEQ ID NO: 10830)] was used. Residues that differ between the MHC alleles were “mutated” using the fix backbone protocol (Rosetta fix_bb; [8]); for peptide TLIESK(me)LPV (SEQ ID NO: 10823 having the recited modification) bound to HLA-A02 (FIG. 4F), PDB id 3MRK [HLA-A02 bound to PLFQVPEPV (SEQ ID NO: 10831)] was used.

[0536] Modeling peptide onto MHC receptor using the selected template—Using the Rosetta fixbb protocol for fixed backbone design⁶⁸, the desired peptide sequence was modeled onto the template peptide, while keeping the side chains of the receptor fixed. Following, Rosetta FlexPepDock refinement in full-atom mode was used to optimize the structure of the complex with the threaded target peptide (all peptide atoms, as well as the receptor interface sidechains were allowed to move). For each sequence, 200 models were generated. These were scored, and the 5 top-models were selected to represent the MHC-peptide interaction of interest. Comparison of the top scoring models of the modified peptides and corresponding non-modified peptides allowed inspection of the atomic details of their differential binding.

[0537] Scoring function—The standard Rosetta score function was used, and models were assessed according to their FlexPepDock reweighted score (sum of Total score, Interface score and Peptide score; where Total score is the overall Rosetta energy score for the complex. Interface score is the energy of pair-wise interactions across the peptide-protein interface and Peptide score is the sum of the Rosetta energy function over the peptide residues). This score was shown to discriminate well near-native structures in previous FlexPepDock modeling studies⁷⁰.

[0538] MSFragger search parameters—Search parameters were set to default for close search with the following changes: Precursor true tolerance was set to 10 ppm; fragment mass tolerance was set to 20 ppm. Search enzyme was set to nonspecific enzyme with cleavage after ARNDCQEGHILKMFPSTWYV (SEQ ID NO: 10832). Peptide lengths were set between 8 and 15. Num enzyme termini=0, clip nTerm M=1, allow multiple variable mods on residue=0, max variable mods per mod=3, max variable mods combinations=65000.

[0539] ProImmune binding assay—ProImmune (www(dot)proimmune(dot)com) Module 2 REVEAL Binding Assay measure the yield of correctly conformed MHC-peptide complex following incubation of the recombinant MHC allele and peptide of interest using a conformational-dependent antibody in an immunoassay. Each peptide is given a score relative to the positive control peptide, which is a known T cell epitope.

[0540] Bioinformatics and data analysis—Statistical analyses were performed in R v 3.6.1. heatmap was drawn with pheatmap 1.0.12 and ComplexHeatmap 2.2.0 R package with Euclidean distances for clustering where relevant. Experimental schematics were generated using BioRender.

### Example 1

### Identification of PTMS on HLA I-Bound Peptides Using a Novel Protein Modification Integrated Search Engine

[0541] Establishment of a novel PROtein Modification Integrated Search Engine (PROMISE)—Current proteomics software focuses on data from samples where an exogenous enzyme, like trypsin, was used to digest the proteins into peptides. This reduces the potential search space to only peptides with either lysine (K) or arginine (R) terminal residues. By contrast, HLA class I peptides are cleaved by the proteasome and a number of endopeptidases, generating peptides that are between 8 and 15 amino acid residues and with any potential terminal residue. Computationally, this means that the search space for endogenously-cleaved peptides with modifications must contain every potential protein fragment with multiple potential mass shifts, leading to an exponential growth of the search space and making search times impractical³⁶. To overcome the challenges of searching for post translational modifications (PTMs) on endogenous peptides in a systematic manner, the present inventors developed a PROtein Modification Integrated Search Engine (PROMISE). PROMISE utilizes distributed computing with an adapted version of MSFragger³⁷ to enable efficient search against combinatorial reference data with multiple modifications. To evaluate pipeline performance PROMISE was compared to MaxQuant³⁸ showing a 100-fold decrease in search time (Table 1 hereinabove). Further, results obtained by PROMISE and standalone MSFragger were 99.2% identical, confirming that the distributed computing has not affected peptide identification. In the next step PROMISE was applied to search for multiple types of PTMs on HLA I-bound peptides, looking for insight into PTM-driven antigenicity.

[0542] Analysis by PROMISE increases identification of modified peptides, enriching the identified immunopeptidome by 11%—To identify a broad range of PTMs, 29 modification combinations of 12 modification types (36 mass shifts; Table 2 hereinbelow) were defined as a variable modification on 16 different amino acids and protein termini (termed hereafter ‘multi-modification search’). These include biological modifications such as methylation, acetylation, phosphorylation, citrullination, ubiquitination, and sumoylation along with multiple technical modifications such as oxidation, deamidation, carbamidomethylation and cysteinylation. Subsequently. PROMISE (FIG. 1A) was used to analyze previously published high-resolution HLA immunopeptidomics data^{11,18,19,39,40} of patient tumors tissues (35), healthy adjacent tissue (5), cancer cell lines (13) and TILs (2). To identify peptides for which the modified state was a better match to the spectrum, the results were compared to the original search criteria, which only included methionine oxidation and protein N-terminus acetylation (termed hereafter ‘standard search’). In both cases, a subgroup FDR at 5% was used by splitting spectra into three different groups based on modification state, ensuring identifications was not increased merely by altering the false positive rate. The multi-modification search identified 32,798 modified peptides, 12.228 of the peptides identified were unique to the multi-modification search, thereby enriching the pool of immunopeptides identified (data not shown).

[0543] Out of the peptide to spectrum matches (PSMs) which conflicted between the two searches (1.34% of PSMs; 10,019 peptides), 86% received a higher scoring match in the multi-modification search. On average, the match score was increased by 15%, suggesting the inclusion of a modification in the predicted peptide better described the spectrum, and the unmodified peptide assignment was a false identification. In total, 10.94% of the peptides identified were unique to the multi-modification search, thereby enriching the pool of immunopeptides identified (FIG. 1B).

[0544] While the amino acid composition of the immunopeptidome was similar between the standard search and PROMISE, an enrichment in amino acids that carry modifications were observed when comparing the modified and unmodified peptide subsets (FIGS. 1C-D). For example, as previously described³⁵, cysteines are consistently under-represented in immunopeptidomics analyses, yet constitute 2% of the modified immunopeptidome. When comparing the distribution of peptide lengths between the modified and unmodified peptides a shift towards longer peptides was observed in the modified subset [p value=2.2e-16; Wilcoxon](FIG. 1E). The UNIMOD database classification was used to differentiate between two general types of modifications: modifications that may arise during sample processing (“technical”) and modifications that reflect the cellular state (“biological”). PROMISE increased the identification of modified peptides, in particular those with biological modifications (FIGS. 1F-G). In addition, identification of peptides with two or more modification was increased six-fold as compared to a standard search (FIGS. 1F-G). In total, 19.630 modification sites were identified that were unique to PROMISE, 88% of which were not included in a standard search (FIG. 1H).

TABLE 2
List of PTMs

| Modification | UNIMOD | Mass | | UNIMOD | |
|---|---|---|---|---|---|
| name | Accession # | shift | Amino acid | classification | remark |
| Methionine | 35 | 15.99490 | M | Artefact | Common |
| oxidation | | | | | chemical non- |
| | | | | | enzymatic |
| | | | | | modification. |
| | | | | | Appears in |
| | | | | | most MS |
| | | | | | searches ⁷² |
| protein N- | 1 | 42.01060 | [X]@N- | Multiple | |
| termini | | | terminus | | |
| acetylation | | | | | |
| Phosphorylation | 21 | 79.96633 | YTS | PTM | |
| Acetylation | 1 | 42.01060 | K | Multiple | ⁷³ |
| Methylation | 34 | 14.01565 | C, H, N, Q, K, R, I, | PTM | |
| | | | L, D, E | | |
| Di-methylation | 36 | 28.0312 | K, R | PTM | |
| Oxidation | 35 | 15.99490 | W, H, K, P, C | KPC-PTM | ⁷⁴ |
| | | | | WH- | |
| | | | | Artefact | |
| Deamidation | 7 | 0.98402 | NQ | Artefact | NQ-Artefact |
| Citrullination | 7 | 0.98402 | R | PTM | Enzymatic |
| | | | | | modification |
| Ubiquitination | 1263 | 57.0215 | K | Other | |
| | 121 | (G) | | Other | |
| | 535 | 114.0429 | | Chemical | |
| | | (GG) | | derivative | |
| | | 270.144 | | | |
| | | (GGR) | | | |
| | | 383.228103 | | | |
| | | (GGRL) | | | |
| Sumoylation | 1293 | 215.0906 | K | Other | G and GG- |
| | | (GGT) | | | cannot |
| | | 343.149184 | | | distinguish |
| | | (GGTQ) | | | between |
| | | | | | ubiquitin, |
| | | | | | Sumo or |
| | | | | | FAT10 |
| FAT10 | 1990 | 227.127 | K | PTM | |
| | | (GGI) | | | |
| | | 330.136176 | | | |
| | | (GGIC) | | | |
| Cysteinylation | 312 | 119.004099 | C | Multiple | |
| Carbamidomethyl | 4 | 57.021464 | C | Chemical | Artefact-used |
| | | | | derivative | as fix |
| | | | | | modification |
| | | | | | in trypsin |
| | | | | | digestion |

### Example 2

### Characterization of the Identified Modified HLA I-Bound Peptides

[0545] An unbiased search of 29 modifications in the immunopeptidome highlighted PTM-driven binding preferences—Peptide binding to major histocompatibility complex (MHC) molecules depends on the biochemical properties of both the peptide and MHC structure. The most critical residues for MHC binding are the ones that fit into the anchor pockets in the MHC groove, typically the second and carboxy-terminal positions⁴¹. By contrast. T-Cell receptors recognition motif is determined by the MHC-peptide complex and therefore most strongly influenced by the residues in position 3 to 7 of the HLA peptide^{42,43}. Given the generated global view of post-translationally modified peptides, whether a given PTM has the tendency to be in certain positions within the HLA peptide was explored. To capture the motifs of the full peptide repertoire, the criteria were loosened and a global FDR correction was used. A broad view across different types of modifications revealed that some modifications have a distinct site preference (FIG. 2A). For example, as previously shown^{10,11}, serine phosphorylation predominantly falls in the 4^{th} position of the HLA-bound peptide. Further, oxidation and cysteinylation are enriched at the end of the peptide (towards the c-terminus), cysteinylation is underrepresented at the second position, and carbamidomethyl is enriched in the third position. By contrast, other technical modifications, which are mainly due to processing, like deamidation, distribute evenly across the peptide. Furthermore, peptides with n-terminus acetylation, meaning they originate from the n-terminus of their parent protein, are longer on average from other peptide subsets (FIG. 2B).

[0546] Following, whether the distribution of these PTMs is distinct from the underlying distributions of the amino acid residues that they modify was explored. In addition, an unbiased and broader background distribution was also examined by collectively defining all of the reported epitopes in the IEDB⁴⁴ database. As expected, when examining a known technical modification, like methionine oxidation, the correlation between the oxidized methionine position distribution and the un-modified methionine distribution was very high (Pearson 0.96, p value=1.05e-6) (FIG. 2C). This suggests that the modification occurred randomly across the peptide during sample preparation or that it does not affect the binding motif at all (F-test; p value=0.543). Known motifs, such as the tendency of serine phosphorylation modification at position 4^{10,11}, were also emphasized as low correlation in this analysis (Pearson 0.41, p value=0.21) as there was a strong deviation between the phosphorylation and underlying serine distributions (FIG. 2D; F-test; p value=2.2e-16). This is despite any experimental or computational enrichments for specific modifications, as a broad search was used that was not modification-specific.

[0547] Given that the correlation between the distributions of the modified and unmodified sites is a good indicator of novel PIM-driven motifs, all of the PTMs detected were ordered based on the correlation of their distribution to the background (FIG. 2E). This metric was used to highlight PTM-driven motifs. For example, lysine residues at the second position of the peptide, in the HLA binding pocket, are under-represented. However, modified lysine residue distributions (e.g. acetylated and methylated lysine) do not produce the same pattern (FIG. 2F). This suggests that unmodified lysine residues in the anchoring position are unfavorable for HLA binding and that the modified state of a lysine residue may be preferred. In contrast, modified arginine such as di/methylated arginine and citrullination are over-represented in positions 3 to 7, and therefore may impact the T-cell receptor recognition⁴² (FIG. 2G), as was previously shown to for other types of modifications. Interestingly, while cysteine modifications on peptides in MS analyses are considered to be introduced by sample processing, in the current analysis of the HLA landscape they have a distinct distribution motif where cysteine carbamidomethyl is enriched in positions 3-4 and cysteinylation is enriched in positions 7-8 (FIG. 2E).

[0548] MHC binding properties are altered by the modification state of the presented peptide—The biochemical binding properties of specific HLA haplotypes are the strongest determinants of peptide motifs. To examine whether the PTM-driven motif detected is associated with specific haplotypes, mono-allelic HLA immunopeptidomics data from Abelin et al⁶ were re-analyzed. The same multi-modification search as described above (Table 2 hereinabove) was conducted on the spectra obtained. Indeed, unique motifs that were haplotype-dependent were identified, using the unmodified amino acid distribution as a background. To focus on the most prominent features, a ‘site score’ was defined such that enrichment in the anchor positions will result in a positive score while enrichment in the middle of the peptide will result in a negative score. In case the PTM is present in many positions in the peptide, the score will be close to zero the tendency of the modification cannot be classified to be in a specific area. The PTMs and haplotypes contained in the dataset were then clustered by their site score (FIG. 3A). This analysis revealed that the same PTM might affect peptide-MHC-TCR interactions differently for different haplotypes. Intriguingly, among the specific HLA haplotypes that were analyzed, several HLA associations with human diseases were found. For example, HLA A*0301 was linked to increased risk for multiple sclerosis 4 and HLA B*5101 was linked to Behcet disease⁴⁶. The current analysis identified both haplotypes to be highly enriched with PTMs in the region that is predicted to affect TCR recognition. HLA-A*201 was previously reported to show a protective effect in EBV-related Hodgkin lymphoma patients⁴⁷ and in the current analysis was enriched with modifications on the anchoring position of the peptide. While it remains to be examined whether certain PTMs play a role in disease-associated manifestations, it has been reported that low HLA binding of disease associated epitopes can be increased by PTM⁴⁸.

[0549] Based on analysis of the detected peptide modifications, the resulting interactions could be classified into three groups: The first group is comprised of chemical mimics, where the modified amino acid is biochemically similar to a different amino acid that was known to be part of the motif. For example, an enrichment of deamidated asparagine in position 3 of the haplotype A0101 motif was identified. Deamidated asparagine is chemically similar to aspartic acid which appears in the A0101 binding motif at position 3 (FIG. 3B). As no unmodified peptide carrying asparagine bound to this haplotype was detected, this result suggests that the modification occurred on the peptide before being bound to the MHC, possibly due to removal of a glycosylation⁴⁹; and the modified asparagine enables the binding of the peptide to the HLA.

[0550] Enrichment of deamidated asparagine and glutamine at HLA haplotype A6802, B4402 and B4403 (FIGS. 13A-P) are additional examples of chemical mimics.

[0551] The second group contains PTMs that cause binding interference. This group is defined by PTMs that sterically hinder the interaction of the peptide with the MHC haplotype, creating an unfavorable binder. For example, acetylated lysine is under-represented in the C-terminus of haplotype A0301 (FIG. 3C) compared to the unmodified background. Importantly, this observation was applied for all of the modified lysines detected in this haplotype, suggesting that the modification of the carboxy-termini could be an immune evasion mechanism. Other examples for binding interference are methylated glutamic acid at anchor position 2 of haplotype B4402/3, and dimethylated arginine at the C-terminus position of haplotype A3101 (FIGS. 13A-P).

[0552] The third group are novel motifs where the modified amino acid creates a favorable binder peptide that is different from the known unmodified motif. It was shown that phosphoserine can replace glutamic acid at anchor position 2 of haplotype B4002¹³. In the generated dataset, methylated glutamine was detected at the peptide C-terminus in haplotype B5401 (FIG. 3D) and oxidized proline was observed at the anchor position two of haplotype A0201 (FIG. 3E). The latter observation is common to the whole haplotype superfamily A02 (FIGS. 13A-P).

[0553] Following, the possibility of a novel PTM binding motif was evaluated using structural modeling. To this end, two representative modified epitopes identified as binders of haplotype A0201 and one representative epitope identified as a binder to haplotype B5401 were chosen. All of them are shared across cancer cell lines and patient's tumor samples. Rosetta FlexPepDock⁵⁰ was used to model the structure of the interactions of these novels MHC-binding PTM motifs. K(ac)P(ox)SLEQSPAVL (SEQ ID NO: 10817 having the recited modifications), KP(ox)LKVIFV (SEQ ID NO: 10827 having the recited modification) and MPTLPPYQ(me) (SEQ ID NO: 10818 having the recited modification). For each such motif, both the modified and unmodified peptides were modeled and their calculated binding energies and structures (“Reweighted score”) were compared. In both cases, the interactions between the MHC and the modified peptide interactions were predicted to be considerably stronger, suggesting the complex is more stable than the non-modified counterpart (FIGS. 3F-G and 5) in agreement with the predictions from PROMISE immunopeptidomics analysis. In the case of peptide K(ac)P(ox)SLEQSPAVL (SEQ ID NO: 10817, having the recited modifications) binding to HLA-A*0201, the model suggests that the hydroxyl group of peptide P(ox)-2 forms a stabilizing hydrogen bond with receptor E-87 (FIG. 3F). Overall, our models recapitulate an interaction similar to a solved structure of HLA-A2 in which T-2 forms hydrogen bonds with receptor K-90 and E-87 (1TVB⁵¹). As for K(ac)-1, in some of the models it interacts with the aliphatic part of receptor K-90, while in others it further stabilizes the peptide. In the case of peptide MPTLPPYQ(me) (SEQ ID NO: 10818 having the recited modification) binding to HLA-5401, Q-8 is positioned in the highly hydrophobic pocket that binds the canonical aliphatic c-terminal peptide position. Methylation allows the otherwise polar (negative) side chain of glutamine to approach (“fill”) the pocket and thereby stabilize the complex (FIG. 3G).

### Example 3

### Identification of Modified HLA I-Bound Peptides Expressed on Cancer Cells

[0554] Among the identified modified peptides, cancer-specific signatures, across different cancer cell lines, were identified. Overall, the modified HLA-1 bound peptides detected on tumor cells are presented in Table 3 hereinabove. In addition, in numerous cases the presented modified peptides were unique to a specific cancer type (FIG. 4A, Table 3 hereinabove). It was hypothesized that this analysis may be influenced by the different protein composition in each cell line or the HLA haplotype and cancer-specific modification pathways. Furthermore, the dataset was searched for matching unmodified peptide, a peptide with the same amino acid sequence without the corresponding PTM (FIG. 4A—right panel). Next, the correlation score for the modified and unmodified peptide pairs was calculated (FIG. 4A; green scale bar). As expected, in a known technically produced modification, like oxidized methionine, 40% of the modified peptides had an unmodified match in the dataset and therefore a higher correlation score. At the top of the heatmap are modifications with a low correlation such as acetylation and citrullination which generally did not have unmodified counterparts. By contrast, some peptides with phosphorylation, dimethylation, and ubiquitination had a matching unmodified version, possibly highlighting their reversible nature and the fact that many proteins exist in the cell in both modified and unmodified states. While some modification types have higher correlation scores than others, peptides without unmodified counterparts in all PTM categories were revealed. For example, peptides from SPAG9 and ZNF165 with oxidations, cysteinylation, and carbamidomethylation were identified. Both proteins are examples of cancer-testis antigens that are not expressed in healthy adult tissues, and therefore may serve as putative targets for cancer immunotherapies (FIG. 4A). For all of these examples, the MS spectra ions had high confidence and matched the claimed peptide sequence including the identified PTM (FIGS. 6A-B).

[0555] To determine whether the signatures are also specific to the cancer state in clinical settings, immunopeptidomics data from a cohort of triple-negative breast cancer and adjacent tissue⁴⁰ were analyzed (Table 3 hereinabove). This analysis revealed that several modifications are significantly reduced in abundance in the tumor immunopeptidome, including carbamidomethyl and citrullination (FIG. 4B). Further, cysteinylated peptides are significantly increased in the tumor immunopeptidome. These changes may reflect alterations in metabolic pathways or peptide processing. For example, it is known that triple-negative breast cancer is addicted to cysteine^{52,53}, potentially explaining the increase in cysteinylated immunopeptides.

[0556] Given the growing interest in identifying antigenic targets for immunotherapy, whether the identified modified peptides originated from cancer-associated or testis antigens was examined. 244 peptides that originated from a protein annotated as a testis antigen (from CT Antigens Database⁵⁴) and 400 peptides that were highly shared across cancer cohorts (FIG. 4C) were identified, indicating the identified modified peptides presented in Table 3 hereinabove may be good targets for therapies. Many of these proteins are also annotated as oncogenes, cancer drivers or tumor suppressors⁵⁵, suggesting that the modifications may modulate the disease pathogenesis.

[0557] To validate that the modified peptides identified with PROMISE are able to bind to HLA, the subset of modified peptides that were identified in immunopeptidomics of an HLA-A0201 cell line and that were not identified in IEDB in their unmodified form were filtered (FIG. 4D). Further, whether the difference in the detection of the modified peptides and their unmodified counterparts was due to their relative ability to bind HLA-A0201 was examined. Structural modeling demonstrated that the methylation on the lysine in position 6 of TLIESKLPV (SEQ ID NO: 10823) is located between 3 other positively charged residues (H-98, R121, and H-138; FIG. 4E). Methylation of K-6 removes its positive charge and thereby alleviates electrostatic repulsion. In addition, the methyl group is nicely packed into the hydrophobic MHC groove. This then causes a more stable peptide-MHC interaction as reflected in a lower reweighted score. To assess the role of peptide modification in altering MHC binding 6 modified peptides and their unmodified counterparts were synthesized and their binding was examined using a binding assay (ProImmune). In these setting 4 of the synthesized modified peptides were confirmed as HLA binders. Of these, three were shown to bind more strongly than their unmodified counterparts (FIG. 4F). Specifically, TLIESK(me)LPV (SEQ ID NO: 10823 having the recited modification) was shown to bind more strongly in its modified form as predicted by the structural model. Of note, the fact that 2 of the synthesized modified peptides did not bind HLA in these experimental settings may be due to absence of all chaperones supporting loading of the peptides to the MHC molecule in this in-vitro settings.

[0558] Of note, the data have also suggested that remnants of ubiquitin tails on peptides, after proteasome degradation, may be detected on peptides bound to MHC molecules. Recently it was found that a proximal ubiquitin modification may undergo degradation with its substrate^{57,59}. As a consequence, a couple of residues from the ubiquitin tail remain attached to the proteasome-cleaved peptide. Here the present inventors report, for the first time, that remnants from ubiquitin and ubiquitin-like (UBL) modifiers remain on the peptide substrate following proteasome cleavage and can be identified in immunopeptidomics (Table 2 hereinabove and FIG. 14).

### Example 4

### Identification of Novel HLA I-Bound Peptides Using the Novel Protein Modification Integrated Search Engine

[0559] Using the above described methodology, the present inventors have identified several novel modified peptides in which the modification is suspected to be technical and hypothesized that they are presented on cancerous cells in an un-modified state (Table 4 hereinabove).

[0560] Although the invention has been described in conjunction with specific embodiments thereof, it is evident that many alternatives, modifications and variations will be apparent to those skilled in the art. Accordingly, it is intended to embrace all such alternatives, modifications and variations that fall within the spirit and broad scope of the appended claims.

[0561] It is the intent of the applicant(s) that all publications, patents and patent applications referred to in this specification are to be incorporated in their entirety by reference into the specification, as if each individual publication, patent or patent application was specifically and individually noted when referenced that it is to be incorporated herein by reference. In addition, citation or identification of any reference in this application shall not be construed as an admission that such reference is available as prior art to the present invention. To the extent that section headings are used, they should not be construed as necessarily limiting. In addition, any priority document(s) of this application is/are hereby incorporated herein by reference in its/their entirety.

### REFERENCES

### Other References are Cited Throughout the Application

[0562] 1. Obara, W. et al. Present status and future perspective of peptide-based vaccine therapy for urological cancer. Cancer Sci. 109, 550-559 (2018).
[0563] 2. Jiang. D., Niwa. M., Koong. A. C. & Diego. S. Cancer immunotherapy: moving forward with peptide T cell vaccines. Eur. J. Vasc. Endovasc. Surg. 49, 48-56 (2016).
[0564] 3. Xia. A.-L., Wang, X.-C., Lu, Y.-J., Lu, X.-J. & Sun, B. oncotarget Chimeric-antigen receptor T (CAR-T) cell therapy for solid tumors: challenges and opportunities. Oncotarget 8, 90521-90531 (2017).
[0565] 4. Finn. O. J. & Rammensee. H. G. Is it possible to develop cancer vaccines to neoantigens, what are the major challenges, and how can these be overcome?: Neoantigens: Nothing new in spite of the name. Cold Spring Harb. Perspect. Biol. 10. (2018).
[0566] 5. Jurtz, V. et al. NetMHCpan-4.0: Improved Peptide-MHC Class I Interaction Predictions Integrating Eluted Ligand and Peptide Binding Affinity Data. J. Immunol. 199, 3360-3368 (2017).
[0567] 6. Abelin, J. G. et al. Mass Spectrometry Profiling of HLA-Associated Peptidomes in Mono-allelic Cells Enables More Accurate Epitope Prediction. Immunity 46, 315-326 (2017).
[0568] 7. O'Donnell, T. J. et al. MHCflurry: Open-Source Class I MHC Binding Affinity Prediction. Cell Syst. 7, 129-132.e4 (2018).
[0569] 8. Gfeller. D. et al. The Length Distribution and Multiple Specificity of Naturally Presented HLA-I Ligands. J. Inmunol. 201, 3705-3716 (2018).
[0570] 9. Bulik-Sullivan, B. et al. Deep learning using tumor HLA peptide mass spectrometry datasets improves neoantigen identification. Nat. Biotechnol. 37, 55-71 (2019).
[0571] 10. Alpizar. A. et al. A molecular basis for the presentation of phosphorylated peptides by HLA-B antigens. Mol. Cell. Proteomics 16, 181-193 (2017).
[0572] 11. Bassani-Sternberg, M. et al. Direct identification of clinically relevant neoepitopes presented on native human melanoma tissue by mass spectrometry. Nat. Commun. 7, 13404 (2016).
[0573] 12. Mohammed. F. et al. The antigenic identity of human class I MHC phosphopeptides is critically dependent upon phosphorylation status. Oncotarget 8, 54160-54172 (2017).
[0574] 13. Marcilla, M. et al. Increased diversity of the hla-b40 ligandome by the presentation of peptides phosphorylated at their main anchor residue. Mol. Cell. Proteomics 13, 462-474 (2014).
[0575] 14. Marino. F. et al. Arginine (Di)methylated Human Leukocyte Antigen Class I Peptides Are Favorably Presented by HLA-B*07. J. Proteome Res. 16, 34-44 (2017).
[0576] 15. Malaker, S. A. et al. Identification of glycopeptides as posttranslationally modified neoantigens in Leukemia. Cancer Inmunol. Res. 5, 376-384 (2017).
[0577] 16. Petersen, J., Purcell, A. W. & Rossjohn, J. Post-translationally modified T cell epitopes: Immune recognition and immunotherapy. Journal of Molecular Medicine vol. 87 1045-1051 (2009).
[0578] 17. Mommen. G. P. M. et al. Expanding the detectable HLA peptide repertoire using electron-transfer/higher-energy collision dissociation (EThcD). Proc. Natl. Acad. Sci. U.S.A. 111, 4507-4512 (2014).
[0579] 18. Bassani-Stemberg. M., Pletscher-Frankild. S., Jensen. L. J. & Mann. M. Mass spectrometry of human leukocyte antigen class I peptidomes reveals strong effects of protein abundance and turnover on antigen presentation. Mol Cell Proteomics 14, 658-673 (2015).
[0580] 19. Chong, C. et al. High-throughput and Sensitive Immunopeptidomics Platform Reveals Profound Interferonγ-Mediated Remodeling of the Human Leukocyte Antigen (HLA) Ligandome. Mol. Cell. Proteomics 17, 533-548 (2018).
[0581] 20. Ott, P. A. et al. An immunogenic personal neoantigen vaccine for patients with melanoma. Nature 547, 217-221 (2017).
[0582] 21. Sahin. U. & Türeci, Ö. Personalized vaccines for cancer immunotherapy. Science (80-.). 359, 1355-1360 (2018).
[0583] 22. Keskin, D. B. et al. Neoantigen vaccine generates intratumoral T cell responses in phase Ib glioblastoma trial. Nature 565, 234-239 (2019).
[0584] 23. Chu. Y., Liu, Q., Wei, J. & Liu, B. Personalized cancer neoantigen vaccines come of age. Theranostics 8, 4238-4246 (2018).
[0585] 24. Schumacher, T. N., Scheper. W. & Kvistborg, P. Cancer Neoantigens. Annu. Rev. Immunol. 37, 173-200 (2019).
[0586] 25. Vizcaino, J. A. et al. The human immunopeptidome project: A roadmap to predict and treat immune diseases. Molecular and Cellular Proteomics vol. 19 31-49 (2020).
[0587] 26. Sulzer, D. et al. T cells from patients with Parkinson's disease recognize α-synuclein peptides. Nature 546, 656-661 (2017).
[0588] 27. Karasaki. T. et al. Prediction and prioritization of neoantigens: integration of RNA sequencing data with whole-exome sequencing. Cancer Sci. 108, 170-177 (2017).
[0589] 28. Hoof. I. et al. NetMHCpan, a method for MHC class i binding prediction beyond humans. Immunogenetics 61, 1-13 (2009).
[0590] 29. Peters, B. & Sette, A. Generating quantitative models describing the sequence specificity of biological processes with the stabilized matrix method. BMC Bioinformatics 6, 1-9 (2005).
[0591] 30. Lundegaard, C. et al. NetMHC-3.0: accurate web accessible predictions of human, mouse and monkey MHC class I affinities for peptides of length 8-11. Nucleic Acids Res. 36, 509-512 (2008).
[0592] 31. Pinkse. M. W. H., Uitto, P. M., Hilhorst, M. J., Ooms, B. & Heck, A. J. R. Selective isolation at the femtomole level of phosphopeptides from proteolytic digests using 2D-NanoLC-ESI-MS/MS and titanium oxide precolumns. Anal. Chenm. 76, 3935-3943 (2004).
[0593] 32. Zhou, H. et al. Enhancing the Identification of Phosphopeptides from Putative Basophilic Kinase Substrates Using Ti (IV) Based IMAC Enrichment. Mol. Cell. Proteomics 10. M110.006452 (2011).
[0594] 33. Rush, J. et al. Immunoaffinity profiling of tyrosine phosphorylation in cancer cells. Nat. Biotechnol. 23, 94-101 (2005).
[0595] 34. Wagner, S. A. et al. A proteome-wide, quantitative survey of in vivo ubiquitylation sites reveals widespread regulatory roles. Mol. Cell. Proteomics 10, M111.013284 (2011).
[0596] 35. Solleder. M. et al. Mass spectrometry based immunopeptidomics leads to robust predictions of phosphorylated HLA class I ligands. Mol. Cell. Proteomics mcp.TIR119.001641 (2019) doi:10.1074/mcp.TIR119.001641.
[0597] 36. Na, S. & Pack. E. Software eyes for protein post-translational modifications. Mass Spectrom. Rev. 34, 133-147 (2015).
[0598] 37. Kong. A. T., Leprevost. F. V. Avtonomov, D. M., Mellacheruvu. D. & Nesvizhskii. A. I. MSFragger: ultrafast and comprehensive peptide identification in mass spectrometry-based proteomics. Nat. Methods 14, 513-520 (2017).
[0599] 38. Cox, J., Michalski, A. & Mann, M. Software Lock Mass by Two-Dimensional Minimization of Peptide Mass Errors. J. Am. Soc. Mass Spectrom. 22, 1373-1380 (2011).
[0600] 39. Shraibman, B., Kadosh, D. M., Barnea, E. & Admon. A. Human Leukocyte Antigen (HLA) Peptides Derived from Tumor Antigens Induced by Inhibition of DNA Methylation for Development of Drug-facilitated Immunotherapy. Mol. Cell. Proteomics 15, 3058-3070 (2016).
[0601] 40. Ternette, N. et al. Immunopeptidomic Profiling of HLA-A2-Positive Triple Negative Breast Cancer Identifies Potential Immunotherapy Target Antigens. Proteomics 18, 1700465 (2018).
[0602] 41. Deres, K., Beck, W., Faath. S., Jung. G. & Rammensee, H. G. MHC/peptide binding studies indicate hierarchy of anchor residues. Cell. Immunol. 151, 158-167 (1993).
[0603] 42. MacLachlan, B. J. et al. Using X-ray Crystallography. Biophysics, and Functional Assays to Determine the Mechanisms Governing T-cell Receptor Recognition of Cancer Antigens. J. Vis. Exp 120, 54991 (2017).
[0604] 43. Wang, Y. et al. How an alloreactive T-cell receptor achieves peptide and MHC specificity, doi:10.1073/pnas.1700459114.
[0605] 44. Vita, R. et al. The Immune Epitope Database (IEDB): 2018 update. Nucleic Acids Res. 47. D339-D343 (2019).
[0606] 45. Fogdell-Hahn. A., Ligers, A., Gronning. M., Hillert, J. & Olerup. O. Multiple sclerosis: a modifying influence of HLA class I genes in an HLA class II associated autoimmune disease. Tissue Antigens 55, 140-148 (2000).
[0607] 46. Wallace, G. R. HLA-B*51 the primary risk in Behçet disease. Proceedings of the National Academy of Sciences of the United States of America vol. 11 8706-8707 (2014).
[0608] 47. Hjalgrim, H. et al. HLA-A alleles and infectious mononucleosis suggest a critical role for cytotoxic T-cell response in EBV-related Hodgkin lymphoma. Proc. Natl. Acad. Sci. U.S.A 107.6400-6405 (2010).
[0609] 48. Sidney, J. et al. Low HLA binding of diabetes-associated CD8+ T-cell epitopes is increased by post translational modifications. BMC Immunol. 19, 12 (2018).
[0610] 49. Skipper. J. C. A. et al. An HLA-A2-restricted tyrosinase antigen on melanoma cells results from posttranslational modification and suggests a novel pathway for processing of membrane proteins. J. Exp. Med. 183, 527-534 (1996).
[0611] 50. Raveh, B., London, N. & Schueler-Furman. O. Sub-angstrom modeling of complexes between flexible peptides and globular proteins. Proteins Struct. Funct. Bioinforna. 78, 2029-2040 (2010).
[0612] 51. Borbulevych, O. Y., Baxter, T. K., Yu. Z., Restifo, N. P. & Baker, B. M. Increased Immunogenicity of an Anchor-Modified Tumor-Associated Antigen Is Due to the Enhanced Stability of the Peptide/MHC Complex: Implications for Vaccine Design. J. Immunol. 174, 4812-4820 (2005).
[0613] 52. Timmerman. L. A. et al. Glutamine Sensitivity Analysis Identifies the xCT Antiporter as a Common Triple-Negative Breast Tumor Therapeutic Target. Cancer Cell 24, 450-465 (2013).
[0614] 53. Tang, X. et al. Cystine addiction of triple-negative breast cancer associated with EMT augmented death signaling. Oncogene 36.4235-4242 (2017).
[0615] 54. Almeida, L. G. et al. CTdatabase: A knowledge-base of high-throughput and curated data on cancer-testis antigens. Nucleic Acids Res. 37, D816 (2009).
[0616] 55. Lever. J., Zhao. E. Y., Grewal. J., Jones, M. R. & Jones, S. J. M. CancerMine: a literature-mined resource for drivers, oncogenes and tumor suppressors in cancer. Nat. Methods 16, 505-507 (2019).
[0617] 56. Schuster. H. et al. Data Descriptor: A tissue-based draft map of the murine MHC class I immunopeptidome. Sci. Data 5, 1-11 (2018).
[0618] 57. Sun. H. et al. Diverse fate of ubiquitin chain moieties: the proximal is degraded with the target, and the distal protects the proximal from removal and recycles. Proc. Natl. Acad. Sci. U.S.A 116, 7805-7812 (2019).
[0619] 58. Ljunggren. H. G. et al. Empty MHC class I molecules come out in the cold. Nature 346, 476-480(1990).
[0620] 59. Singh. S. K. et al. Synthetic Uncleavable Ubiquitinated Proteins Dissect Proteasome Deubiquitination and Degradation, and Highlight Distinctive Fate of Tetraubiquitin. J. Am. Chem. Soc. 138, 16004-16015 (2016).
[0621] 60. Wolf-Levy, H. et al. Revealing the cellular degradome by mass spectrometry analysis of proteasome-cleaved peptides. Nat. Biotechnol. 36, 1110-1116 (2018).
[0622] 61. Thomsen, M. C. F. & Nielsen, M. Seq2Logo: a method for construction and visualization of amino acid binding motifs and sequence profiles including sequence weighting, pseudo counts and two-sided representation of amino acid enrichment and depletion. Nucleic Acids Res. 40, W281-W287 (2012).
[0623] 62. Vacic. V., Iakoucheva. L. M. & Radivojac. P. Two Sample Logo: A graphical representation of the differences between two sets of sequence alignments. Bioinformatics 22, 1536-1537 (2006).
[0624] 63. Alam, N. & Schueler-Furman, O. Modeling peptide-protein structure and binding using monte carlo sampling approaches: Rosetta flexpepdock and flexpepbind, in Methods in Molecular Biology vol. 1561 139-169 (Humana Press Inc., 2017).
[0625] 64. London. N., Lamphear, C. L., Hougland, J. L., Fierke, C. A. & Schueler-Furman, O. Identification of a novel class of famesylation targets by structure-based modeling of binding specificity. PLoS Comput. Biol. 7, (2011).
[0626] 65. McMurtrey, C. et al. Toxoplasma gondii peptide ligands open the gate of the HLA class I binding groove. Elife 5, 1-19 (2016).
[0627] 66. Liu. J. et al. Cross-Allele Cytotoxic T Lymphocyte Responses against 2009 Pandemic H1N1 Influenza A Virus among HLA-A24 and HLA-A3 Supertype-Positive Individuals. J. Virol. 86, 13281-13294 (2012).
[0628] 67. Wynn, K. K. et al. Impact of clonal competition for peptide-MHC complexes on the CD8+ T-cell repertoire selection in a persistent viral infection. Blood 111, 4283-4292 (2008).
[0629] 68. Kuhlman, B. et al. Design of a Novel Globular Protein Fold with Atomic-Level Accuracy. Science (80-.). 302, 1364-1369 (2003).
[0630] 69. Alford, R. F. et al. The Rosetta All-Atom Energy Function for Macromolecular Modeling and Design. J. Chem. Theory Comput. 13, 3031-3048 (2017).
[0631] 70. Alam. N. et al. High-resolution global peptide-protein docking using fragments-based PIPER-FlexPepDock. PLoS Comput. Biol. (2017) doi:10.1021/cm0020051.
[0632] 71. Li, K., Vaudel. M., Zhang. B., Ren, Y. & Wen, B. PDV: an integrative proteomics data viewer. Bioinformatics 35, 1249-1251 (2019).
[0633] 72. Kim. M., Zhong, J. & Pandey, A. Common errors in mass spectrometry-based analysis of posttranslational modifications. 16, 700-714 (2017).
[0634] 73. Li, Y. et al. Mass spectrometry-based detection of protein acetylation Yu. 1077, 81-104 (2013).
[0635] 74. Verrastro. I., Pasha. S., Jensen, K. T., Pitt, A. R. & Spickett, C. M. Mass spectrometry-based methods for identifying oxidized proteins in disease: Advances and challenges. Biomolecules 5, 378-411 (2015).

LENGTHY TABLES
The patent application contains a lengthy table section. A copy of the table is available in electronic form from the USPTO web site (https://seqdata.uspto.gov/?pageRequest=docDetail&DocID=US20240029819A1). An electronic copy of the table will also be available from the USPTO upon request and payment of the fee set forth in 37 CFR 1.19(b)(3).

What is claimed is:

1. A computer implemented method for generating a dataset of post translations modifications (PTM) on major histocompatibility complex (MHC) bound peptides, comprising:
receiving a mass spectrometry (MS) dataset obtained from a sample of cells associated with a target disease for treatment, the MS dataset storing a plurality of spectra data elements outputted by a MS device analyzing MHC bound peptides to generate a plurality of amino acid sequences, each spectra data element for a respective amino acid sequence of the MHC bound peptides;
receiving a reference sequence dataset storing amino acid sequences of proteins;
receiving a variable modification dataset storing a plurality of modifications each including a respective amino acid and expected mast shift;
generating a plurality of combination, each combination including a respective amino acid sequence selected from the reference sequence dataset and at least one modification selected from the variable modification dataset;
searching using a plurality of processors connected in parallel, wherein each processor searches for a respective spectra element on the plurality of combinations to identify a plurality of best peptide to spectra matches (PSMs), wherein each respective processor assigns a ranking score to respective PSM according to the respective search performed by the respective processor;
aggregating the plurality of PSMs from the plurality of processors connected in parallel to generate a main PSM list with main ranking score by computing the main ranking score from the ranking score of each respective PSM of each respective search;
selecting highest ranking PSMs according to respective main ranking scores;
storing in a modified sequence dataset, a plurality of modified sequences each including the PTM and sequences corresponding to the selected highest ranking PSMs, wherein the modified sequence dataset stores an indication of binding motifs defined by a plurality of identified PTM and corresponding sequence; and
providing the modified sequence dataset for selecting a certain binding motif having a certain PTM and corresponding amino acid sequence from the modified sequence dataset capable of specifically binding an MHC presented peptide for treatment of the target disease.

2. The method of claim 1, further comprising:
creating a training dataset by labelling each modified sequence for each respective motif of the modified sequence dataset, each modified sequence including an amino acid sequence, PTM type, and position of the PTM on the amino acid sequence, each label including an indication of one or more of: an MHC type, parent gene, and position of the motif within a full protein length; and
training a machine learning (ML) model using the training dataset,
wherein for an input of a certain modified sequence defined by a combination of an amino acid sequence and at least one PTM into the ML model, an indication of whether the certain modified sequence is predicted to fit a binding motif that binds to a cell of the MHC type is obtained as an outcome of the ML model, and
for an input of an amino acid sequence of a full protein length and PTMs into the ML model, at least one modified sequence predicted to fit a binding motif is obtained as an outcome of the ML model.

3. The method of claim 1, wherein at least one of:
the modified sequence dataset stores peptides selected from the group consisting of SEQ ID NO: 1-10746, 10817, 10819, 10820, 10823, 10824, 10826 and 10827,
the target disease comprises cancer, and the certain binding motif is selected for treating the cancer using immunotherapy, and
the MHC comprises HLA I.

4. The method of claim 1, wherein searching comprises:
allocating a respective subset of the plurality of combinations to a plurality of processors connected for parallel processing, each respective processors searching the respective spectra element on the respective subset to identify a respective set of PSM,
merging the respective set of PSM of each respective processor to create a PSM aggregation dataset,
wherein the highest ranking PSMs are selected from the PSM aggregation dataset.

5. The method of claim 4, wherein statistical parameters used in a subsequent false discovery rate (FDR) calculation are distorted by a plurality of searches of a same reference dataset over different software instances executed by the plurality of processors, and wherein merging further comprises:
removing duplicated PSM from the PSM aggregation dataset by using unmodified hits combined histogram to evaluate a number of duplicated PSM and identify the duplicated PSM for removal thereof, and
recalculating an expectation based on a restored score histogram for each PSM.

6. The method of claim 4, further comprising:
computing a plurality of quality assignment measures, and performing the following using the quality assignment measures:
validating the PTM of each member of the PSM aggregation dataset according to the quality measures;
filtering ambiguous assignments and isobaric decoys of the PSM aggregation dataset according to a filtering threshold;
ranking members of the PSM aggregation dataset; and
selecting the highest ranking PSMs according to the highest ranked member of the PSM aggregation dataset.

7. The method of claim 4, further comprising:
computing a probability score indicative of match accuracy for each PSM, wherein the highest ranking PSMs are selected according to highest probability.

8. The method of claim 1, further comprising:
dividing the PSM aggregation dataset into groups including: unmodified, standard search modification types, and other modification types, using a threshold cutoff based on respective abundance in the PSM aggregation dataset;
for each group the PSM are sorted by probability score and a threshold is set for assuring false identification is below the FDR limits.

9. The method of claim 8, when a difference in probability scores is below a defined percentage of the average probability score, the lower-ranked PSM are obtained and added to the modified sequence dataset.

10. The method of claim 8, wherein a certain PSM is identified as the highest ranking PSMs when the certain PSM is identified as having a highest probability score in one respective set of PSM and a lower ranked probability score in another respective set of PSM.

11. The method of claim 1, further comprising:
extracting the peaks from the PSM;
for each peak, computing a plurality of theoretical fragment ions for an unmodified version of the respective peptide and adjust each theoretical fragment ion according to the modification mass shift, and annotating the respective peak with the theoretical fragment ions.

12. The method of claim 11, wherein the plurality of theoretical fragment ions includes a, b, y precursor and diagnostic ions with potential ammonium and water lost in expected peptide charges.

13. The method of claim 12, further comprising:
for each PSM, searching for modification reporter ions, providing a number of b and y ions, and computing a proportion of ion current (PIC),
wherein unassigned peaks with significant intensity indicate a discrepancy between an observed spectrum defined by the respective spectra element of the plurality of PSMs and a matched peptide of the PSM.

14. The method of claim 11, further comprising:
for each PTM of each PSM, creating a window of potential site positions based on the annotated peaks, wherein at least one of: (i) including alternative site positions within the window, and (ii) including alternative combinations of modifications with equivalent mass.

15. The method of claim 1, wherein for each respective PTM of each identified PSM:
searching for identical masses or combination of masses that match the respective PTM mass shift indicative of mass decoy and/or isobaric masses, and in response to finding the identical masses or combination of masses, removing the ambiguous respective identified PSM corresponding to the respective PTM.

16. The method of claim 1, further comprising excluding PSM with total peptide mass greater than average mass of a maximum peptide length plus a tolerance value.

17. The method of claim 1, further comprising, for each respective PSM, searching in a dataset of known PSM of healthy cells and cells with the target disease for a match, and increasing likelihood of the respective PSM being included in the modified sequence dataset when the PSM is found in the dataset of known PSM.

18. A method for creating a ML model for predicting when a modified sequence binds to MHC, comprising:
creating a training dataset by labelling each modified sequence for each respective motif of the modified sequence dataset, each modified sequence including an amino acid sequence, PTM type, and position of the PTM on the amino acid sequence, the modified sequence dataset created as in claim 1, each label including an indication of one or more of: an MHC type, parent gene, and position of the motif within a full protein length; and
training a machine learning (ML) model using the training dataset,
wherein for an input of a certain modified sequence defined by a combination of an amino acid sequence and at least one PTM into the ML model, an indication of whether the certain modified sequence is predicted to fit a binding motif that binds to a cell of the MHC type is obtained as an outcome of the ML model, and
for an input of an amino acid sequence of a full protein length and PTMs into the ML model, at least one modified sequence predicted to fit a binding motif is obtained as an outcome of the ML model.

19. A computer implemented method of predicting a motif on a target HLA complex, comprising
receiving an input of one of: (i) a certain modified sequence defined by an amino acid sequence and a PTM, and (ii) an amino acid sequence of a full protein length and PTMs;
feeding the input into an ML model created as in claim 1; and
obtaining as an outcome of the ML model, for the input of (i) an indication of whether the certain modified sequence is predicted to fit a motif that binds to a cell of the MHC type, and for the input of (ii) obtaining at least one motif predicted to be created from the full protein length and PTMs.

The application's sequence listing, which the Patent Office published only in electronic form, follows.

SEQUENCE LISTING (10832 sequences)

SEQ ID NO: 1 - protein, 9 aa, synthetic construct
  REGION 1..9: note = short peptide
TFQQNASSM

SEQ ID NO: 2 - protein, 9 aa, synthetic construct
  REGION 1..9: note = short peptide
CCQIPLFGI

SEQ ID NO: 3 - protein, 10 aa, synthetic construct
  REGION 1..10: note = short peptide
SVFSPSFGLK

SEQ ID NO: 4 - protein, 8 aa, synthetic construct
  REGION 1..8: note = short peptide
VCEIGSKV

SEQ ID NO: 5 - protein, 13 aa, synthetic construct
  REGION 1..13: note = short peptide
IQAGQCGNQIGAK

SEQ ID NO: 6 - protein, 13 aa, synthetic construct
  REGION 1..13: note = short peptide
LQAGQCGNQIGAK

SEQ ID NO: 7 - protein, 8 aa, synthetic construct
  REGION 1..8: note = short peptide
NPPVLHII

SEQ ID NO: 8 - protein, 11 aa, synthetic construct
  REGION 1..11: note = short peptide
GTVTPPPRLVK

SEQ ID NO: 9 - protein, 8 aa, synthetic construct
  REGION 1..8: note = short peptide
CQICITYI

SEQ ID NO: 10 - protein, 10 aa, synthetic construct
  REGION 1..10: note = short peptide
RSKSPAPVEK

SEQ ID NO: 11 - protein, 10 aa, synthetic construct
  REGION 1..10: note = short peptide
GANQLVVLNV

SEQ ID NO: 12 - protein, 9 aa, synthetic construct
  REGION 1..9: note = short peptide
TFQQNASSM

SEQ ID NO: 13 - protein, 8 aa, synthetic construct
  REGION 1..8: note = short peptide
DAPCVVKV

SEQ ID NO: 14 - protein, 9 aa, synthetic construct
  REGION 1..9: note = short peptide
TNEEPLPKK

SEQ ID NO: 15 - protein, 9 aa, synthetic construct
  REGION 1..9: note = short peptide
GTDEHVVCK

SEQ ID NO: 16 - protein, 12 aa, synthetic construct
  REGION 1..12: note = short peptide
KTKHLEQNGSLK

SEQ ID NO: 17 - protein, 9 aa, synthetic construct
  REGION 1..9: note = short peptide
SVVSVIVKN

SEQ ID NO: 18 - protein, 10 aa, synthetic construct
  REGION 1..10: note = short peptide
RKHTAITTFI

SEQ ID NO: 19 - protein, 11 aa, synthetic construct
  REGION 1..11: note = short peptide
GVMTPCDKILK

SEQ ID NO: 20 - protein, 11 aa, synthetic construct
  REGION 1..11: note = short peptide
VVCPVSDILYK

SEQ ID NO: 21 - protein, 9 aa, synthetic construct
  REGION 1..9: note = short peptide
CPYDKNHQI

SEQ ID NO: 22 - protein, 9 aa, synthetic construct
  REGION 1..9: note = short peptide
GTDEHVVCK

SEQ ID NO: 23 - protein, 13 aa, synthetic construct
  REGION 1..13: note = short peptide
ASFLPCSKDALLK

SEQ ID NO: 24 - protein, 8 aa, synthetic construct
  REGION 1..8: note = short peptide
QQLTNTEV

SEQ ID NO: 25 - protein, 11 aa, synthetic construct
  REGION 1..11: note = short peptide
AIMGNSSEFQK

SEQ ID NO: 26 - protein, 9 aa, synthetic construct
  REGION 1..9: note = short peptide
KDAREFLDK

SEQ ID NO: 27 - protein, 9 aa, synthetic construct
  REGION 1..9: note = short peptide
EQYEFCYKV

SEQ ID NO: 28 - protein, 9 aa, synthetic construct
  REGION 1..9: note = short peptide
VQRKMPCVF

SEQ ID NO: 29 - protein, 10 aa, synthetic construct
  REGION 1..10: note = short peptide
DPYGNRPLCI

SEQ ID NO: 30 - protein, 8 aa, synthetic construct
  REGION 1..8: note = short peptide
CQIILNQV

SEQ ID NO: 31 - protein, 8 aa, synthetic construct
  REGION 1..8: note = short peptide
CQTIIPKI

SEQ ID NO: 32 - protein, 9 aa, synthetic construct
  REGION 1..9: note = short peptide
ESYSVYVYK

SEQ ID NO: 33 - protein, 10 aa, synthetic construct
  REGION 1..10: note = short peptide
SSASPSKATK

SEQ ID NO: 34 - protein, 11 aa, synthetic construct
  REGION 1..11: note = short peptide
AVIVLVENFYK

SEQ ID NO: 35 - protein, 11 aa, synthetic construct
  REGION 1..11: note = short peptide
ALPLDTVTFYK

SEQ ID NO: 36 - protein, 8 aa, synthetic construct
  REGION 1..8: note = short peptide
CQYRVSML

SEQ ID NO: 37 - protein, 9 aa, synthetic construct
  REGION 1..9: note = short peptide
ASNGHEVAR

SEQ ID NO: 38 - protein, 10 aa, synthetic construct
  REGION 1..10: note = short peptide
KAITPPQQPY

SEQ ID NO: 39 - protein, 10 aa, synthetic construct
  REGION 1..10: note = short peptide
KTATAVAHCK

SEQ ID NO: 40 - protein, 9 aa, synthetic construct
  REGION 1..9: note = short peptide
KIRSPGKNH

SEQ ID NO: 41 - protein, 12 aa, synthetic construct
  REGION 1..12: note = short peptide
AVQDAVDALMQK

SEQ ID NO: 42 - protein, 13 aa, synthetic construct
  REGION 1..13: note = short peptide
STISEQEAGVLCK

SEQ ID NO: 43 - protein, 11 aa, synthetic construct
  REGION 1..11: note = short peptide
AIMGNSSEFQK

SEQ ID NO: 44 - protein, 9 aa, synthetic construct
  REGION 1..9: note = short peptide
TTFSPSGKL

SEQ ID NO: 45 - protein, 9 aa, synthetic construct
  REGION 1..9: note = short peptide
LPAPVVPCV

SEQ ID NO: 46 - protein, 8 aa, synthetic construct
  REGION 1..8: note = short peptide
CFININYI

SEQ ID NO: 47 - protein, 11 aa, synthetic construct
  REGION 1..11: note = short peptide
SVCSSGPEYLK

SEQ ID NO: 48 - protein, 10 aa, synthetic construct
  REGION 1..10: note = short peptide
KVYGKASHLK

SEQ ID NO: 49 - protein, 9 aa, synthetic construct
  REGION 1..9: note = short peptide
YPLCQIHHV

SEQ ID NO: 50 - protein, 13 aa, synthetic construct
  REGION 1..13: note = short peptide
STISEQEAGVLCK

SEQ ID NO: 51 - protein, 8 aa, synthetic construct
  REGION 1..8: note = short peptide
LCQPGLVI

SEQ ID NO: 52 - protein, 12 aa, synthetic construct
  REGION 1..12: note = short peptide
SVFDNSIKTFGV

SEQ ID NO: 53 - protein, 9 aa, synthetic construct
  REGION 1..9: note = short peptide
STIKFQMKK

SEQ ID NO: 54 - protein, 9 aa, synthetic construct
  REGION 1..9: note = short peptide
MPVIPMNTI

SEQ ID NO: 55 - protein, 9 aa, synthetic construct
  REGION 1..9: note = short peptide
MPPPPPQGV

SEQ ID NO: 56 - protein, 12 aa, synthetic construct
  REGION 1..12: note = short peptide
ATMPSDVLEVTK

SEQ ID NO: 57 - protein, 9 aa, synthetic construct
  REGION 1..9: note = short peptide
DIIKHIVAK

SEQ ID NO: 58 - protein, 9 aa, synthetic construct
  REGION 1..9: note = short peptide
SVRSPTPYK

SEQ ID NO: 59 - protein, 11 aa, synthetic construct
  REGION 1..11: note = short peptide
SVYTPCDTQNK

SEQ ID NO: 60 - protein, 8 aa, synthetic construct
  REGION 1..8: note = short peptide
LLGPMFKN

SEQ ID NO: 61 - protein, 11 aa, synthetic construct
  REGION 1..11: note = short peptide
RVDPDSQQNHS

SEQ ID NO: 62 - protein, 8 aa, synthetic construct
  REGION 1..8: note = short peptide
QMIRLHVQ

SEQ ID NO: 63 - protein, 11 aa, synthetic construct
  REGION 1..11: note = short peptide
SATNNIAQARK

SEQ ID NO: 64 - protein, 8 aa, synthetic construct
  REGION 1..8: note = short peptide
KTDQFFKK

SEQ ID NO: 65 - protein, 13 aa, synthetic construct
  REGION 1..13: note = short peptide
AAFAVEPQGPALG

SEQ ID NO: 66 - protein, 9 aa, synthetic construct
  REGION 1..9: note = short peptide
KDAREFIDK

SEQ ID NO: 67 - protein, 8 aa, synthetic construct
  REGION 1..8: note = short peptide
CQYVTEKV

SEQ ID NO: 68 - protein, 8 aa, synthetic construct
  REGION 1..8: note = short peptide
VFLSVPCI

SEQ ID NO: 69 - protein, 9 aa, synthetic construct
  REGION 1..9: note = short peptide
SCCPVGCAK

SEQ ID NO: 70 - protein, 9 aa, synthetic construct
  REGION 1..9: note = short peptide
DAYGNCVTV

SEQ ID NO: 71 - protein, 9 aa, synthetic construct
  REGION 1..9: note = short peptide
AQHCFIKSI

SEQ ID NO: 72 - protein, 10 aa, synthetic construct
  REGION 1..10: note = short peptide
GTCGGKPAER

SEQ ID NO: 73 - protein, 11 aa, synthetic construct
  REGION 1..11: note = short peptide
ATCLPNQTVLK

SEQ ID NO: 74 - protein, 12 aa, synthetic construct
  REGION 1..12: note = short peptide
AVFKGFSDCLLK

SEQ ID NO: 75 - protein, 9 aa, synthetic construct
  REGION 1..9: note = short peptide
DIIKHIVAK

SEQ ID NO: 76 - protein, 11 aa, synthetic construct
  REGION 1..11: note = short peptide
SVYTPCDTQNK

SEQ ID NO: 77 - protein, 8 aa, synthetic construct
  REGION 1..8: note = short peptide
KTDQFFKK

SEQ ID NO: 78 - protein, 9 aa, synthetic construct
  REGION 1..9: note = short peptide
SCCPVGCAK

SEQ ID NO: 79 - protein, 9 aa, synthetic construct
  REGION 1..9: note = short peptide
SCCPVGCAK

SEQ ID NO: 80 - protein, 10 aa, synthetic construct
  REGION 1..10: note = short peptide
TVFWNSSNPK

SEQ ID NO: 81 - protein, 10 aa, synthetic construct
  REGION 1..10: note = short peptide
KTATAVAHCK

SEQ ID NO: 82 - protein, 9 aa, synthetic construct
  REGION 1..9: note = short peptide
KTISFVPCT

SEQ ID NO: 83 - protein, 8 aa, synthetic construct
  REGION 1..8: note = short peptide
VFLELIRA

SEQ ID NO: 84 - protein, 8 aa, synthetic construct
  REGION 1..8: note = short peptide
PPVLCSCP

SEQ ID NO: 85 - protein, 9 aa, synthetic construct
  REGION 1..9: note = short peptide
TGCVLVLSR

SEQ ID NO: 86 - protein, 11 aa, synthetic construct
  REGION 1..11: note = short peptide
TAGAELPGPGA

SEQ ID NO: 87 - protein, 9 aa, synthetic construct
  REGION 1..9: note = short peptide
SSSSPFKFK

SEQ ID NO: 88 - protein, 9 aa, synthetic construct
  REGION 1..9: note = short peptide
HVYSWPKNK

SEQ ID NO: 89 - protein, 9 aa, synthetic construct
  REGION 1..9: note = short peptide
KKMESQAAR

SEQ ID NO: 90 - protein, 9 aa, synthetic construct
  REGION 1..9: note = short peptide
KGTGVVTSV

SEQ ID NO: 91 - protein, 10 aa, synthetic construct
  REGION 1..10: note = short peptide
KESSKFPFGI

SEQ ID NO: 92 - protein, 10 aa, synthetic construct
  REGION 1..10: note = short peptide
KSAPATGGVK

SEQ ID NO: 93 - protein, 11 aa, synthetic construct
  REGION 1..11: note = short peptide
KSAPATGGVKK

SEQ ID NO: 94 - protein, 8 aa, synthetic construct
  REGION 1..8: note = short peptide
HSFTPNCI

SEQ ID NO: 95 - protein, 8 aa, synthetic construct
  REGION 1..8: note = short peptide
YQLAVTKV

SEQ ID NO: 96 - protein, 10 aa, synthetic construct
  REGION 1..10: note = short peptide
KLNQKRAELK

SEQ ID NO: 97 - protein, 9 aa, synthetic construct
  REGION 1..9: note = short peptide
KVCMYFTYK

SEQ ID NO: 98 - protein, 9 aa, synthetic construct
  REGION 1..9: note = short peptide
LPLSTCQSI

SEQ ID NO: 99 - protein, 9 aa, synthetic construct
  REGION 1..9: note = short peptide
CYNNQQVFK

SEQ ID NO: 100 - protein, 8 aa, synthetic construct
  REGION 1..8: note = short peptide
VQRILPCL

SEQ ID NO: 101 - protein, 9 aa, synthetic construct
  REGION 1..9: note = short peptide
VQCQHRWQK

SEQ ID NO: 102 - protein, 9 aa, synthetic construct
  REGION 1..9: note = short peptide
KTISFVPCT

SEQ ID NO: 103 - protein, 9 aa, synthetic construct
  REGION 1..9: note = short peptide
HVYSWPKNK

SEQ ID NO: 104 - protein, 9 aa, synthetic construct
  REGION 1..9: note = short peptide
KKMESQAAR

SEQ ID NO: 105 - protein, 8 aa, synthetic construct
  REGION 1..8: note = short peptide
HAQSGTIM

SEQ ID NO: 106 - protein, 10 aa, synthetic construct
  REGION 1..10: note = short peptide
RMFQDIGVSK

SEQ ID NO: 107 - protein, 9 aa, synthetic construct
  REGION 1..9: note = short peptide
ATVDKTVCK

SEQ ID NO: 108 - protein, 10 aa, synthetic construct
  REGION 1..10: note = short peptide
GTINIVHPKL

SEQ ID NO: 109 - protein, 13 aa, synthetic construct
  REGION 1..13: note = short peptide
ATMPSDVLEVTKK

SEQ ID NO: 110 - protein, 8 aa, synthetic construct
  REGION 1..8: note = short peptide
HQQLLLNK

SEQ ID NO: 111 - protein, 9 aa, synthetic construct
  REGION 1..9: note = short peptide
IFGCIVILI

SEQ ID NO: 112 - protein, 9 aa, synthetic construct
  REGION 1..9: note = short peptide
ATASPIVAR

SEQ ID NO: 113 - protein, 13 aa, synthetic construct
  REGION 1..13: note = short peptide
ATIQTAINNGTVK

SEQ ID NO: 114 - protein, 10 aa, synthetic construct
  REGION 1..10: note = short peptide
SVKNITPRKK

SEQ ID NO: 115 - protein, 13 aa, synthetic construct
  REGION 1..13: note = short peptide
DGRDPGNGTHGLS

SEQ ID NO: 116 - protein, 11 aa, synthetic construct
  REGION 1..11: note = short peptide
SVYTPCDTQNK

SEQ ID NO: 117 - protein, 12 aa, synthetic construct
  REGION 1..12: note = short peptide
GDAPSPEEKLHL

SEQ ID NO: 118 - protein, 8 aa, synthetic construct
  REGION 1..8: note = short peptide
TAAQVVTQ

SEQ ID NO: 119 - protein, 8 aa, synthetic construct
  REGION 1..8: note = short peptide
YMKAAQLL

SEQ ID NO: 120 - protein, 8 aa, synthetic construct
  REGION 1..8: note = short peptide
MPYTPICI

SEQ ID NO: 121 - protein, 12 aa, synthetic construct
  REGION 1..12: note = short peptide
KLILQNHILKVK

SEQ ID NO: 122 - protein, 8 aa, synthetic construct
  REGION 1..8: note = short peptide
KDHGMVPF

SEQ ID NO: 123 - protein, 9 aa, synthetic construct
  REGION 1..9: note = short peptide
KKGWPKGKS

SEQ ID NO: 124 - protein, 10 aa, synthetic construct
  REGION 1..10: note = short peptide
KGKTGGPSIR

SEQ ID NO: 125 - protein, 9 aa, synthetic construct
  REGION 1..9: note = short peptide
AQCGKAFPK

SEQ ID NO: 126 - protein, 9 aa, synthetic construct
  REGION 1..9: note = short peptide
NPPPPQTGV

SEQ ID NO: 127 - protein, 15 aa, synthetic construct
  REGION 1..15: note = short peptide
NTQIFKTNTQTYREN

SEQ ID NO: 128 - protein, 8 aa, synthetic construct
  REGION 1..8: note = short peptide
MPTKLQKL

SEQ ID NO: 129 - protein, 9 aa, synthetic construct
  REGION 1..9: note = short peptide
QICDTYNQK

SEQ ID NO: 130 - protein, 11 aa, synthetic construct
  REGION 1..11: note = short peptide
SQCSSLIHHQK

SEQ ID NO: 131 - protein, 8 aa, synthetic construct
  REGION 1..8: note = short peptide
TPCDTQNK

SEQ ID NO: 132 - protein, 9 aa, synthetic construct
  REGION 1..9: note = short peptide
AVCRYFYSK

SEQ ID NO: 133 - protein, 12 aa, synthetic construct
  REGION 1..12: note = short peptide
YIGSTYFERCLK

SEQ ID NO: 134 - protein, 11 aa, synthetic construct
  REGION 1..11: note = short peptide
ATCFATKNGIK

SEQ ID NO: 135 - protein, 9 aa, synthetic construct
  REGION 1..9: note = short peptide
GTQGKLTCK

SEQ ID NO: 136 - protein, 10 aa, synthetic construct
  REGION 1..10: note = short peptide
GTCQFSLVQK

SEQ ID NO: 137 - protein, 8 aa, synthetic construct
  REGION 1..8: note = short peptide
EQRYTCHV

SEQ ID NO: 138 - protein, 9 aa, synthetic construct
  REGION 1..9: note = short peptide
TFQQNASSM

SEQ ID NO: 139 - protein, 11 aa, synthetic construct
  REGION 1..11: note = short peptide
SVQYCDVLHKK

SEQ ID NO: 140 - protein, 8 aa, synthetic construct
  REGION 1..8: note = short peptide
CQVTVAHI

SEQ ID NO: 141 - protein, 8 aa, synthetic construct
  REGION 1..8: note = short peptide
CQYRVSML

SEQ ID NO: 142 - protein, 8 aa, synthetic construct
  REGION 1..8: note = short peptide
DFPVAMQI

SEQ ID NO: 143 - protein, 10 aa, synthetic construct
  REGION 1..10: note = short peptide
RMFQDIGVSK

SEQ ID NO: 144 - protein, 9 aa, synthetic construct
  REGION 1..9: note = short peptide
ATVDKTVCK

SEQ ID NO: 145 - protein, 8 aa, synthetic construct
  REGION 1..8: note = short peptide
TAAQVVTQ

SEQ ID NO: 146 - protein, 8 aa, synthetic construct
  REGION 1..8: note = short peptide
MPYTPICI

SEQ ID NO: 147 - protein, 12 aa, synthetic construct
  REGION 1..12: note = short peptide
KLILQNHILKVK

SEQ ID NO: 148 - protein, 15 aa, synthetic construct
  REGION 1..15: note = short peptide
NTQIFKTNTQTYREN

SEQ ID NO: 149 - protein, 11 aa, synthetic construct
  REGION 1..11: note = short peptide
SVYTPCDTQNK

SEQ ID NO: 150 - protein, 9 aa, synthetic construct
  REGION 1..9: note = short peptide
SSCGKFQTK

SEQ ID NO: 151 - protein, 8 aa, synthetic construct
  REGION 1..8: note = short peptide
KTAQPHPK

SEQ ID NO: 152 - protein, 13 aa, synthetic construct
  REGION 1..13: note = short peptide
STISEQEAGVLCK

SEQ ID NO: 153 - protein, 12 aa, synthetic construct
  REGION 1..12: note = short peptide
AAVLNAERLEVS

SEQ ID NO: 154 - protein, 13 aa, synthetic construct
  REGION 1..13: note = short peptide
ATMPSDVLEVTKK

SEQ ID NO: 155 - protein, 10 aa, synthetic construct
  REGION 1..10: note = short peptide
KSAPSTGGVK

SEQ ID NO: 156 - protein, 8 aa, synthetic construct
  REGION 1..8: note = short peptide
KSEQTKSK

SEQ ID NO: 157 - protein, 10 aa, synthetic construct
  REGION 1..10: note = short peptide
ASFTPTSILK

SEQ ID NO: 158 - protein, 13 aa, synthetic construct
  REGION 1..13: note = short peptide
ASFLPCSKDALLK

SEQ ID NO: 159 - protein, 15 aa, synthetic construct
  REGION 1..15: note = short peptide
VRMAVQDAVDALMQK

SEQ ID NO: 160 - protein, 12 aa, synthetic construct
  REGION 1..12: note = short peptide
VSAVPMATPAPA

SEQ ID NO: 161 - protein, 9 aa, synthetic construct
  REGION 1..9: note = short peptide
VTSSPVEKK

SEQ ID NO: 162 - protein, 11 aa, synthetic construct
  REGION 1..11: note = short peptide
KSAPATGGVKK

SEQ ID NO: 163 - protein, 11 aa, synthetic construct
  REGION 1..11: note = short peptide
KSKSPEKVSSF

SEQ ID NO: 164 - protein, 11 aa, synthetic construct
  REGION 1..11: note = short peptide
KSAPATGGVKK

SEQ ID NO: 165 - protein, 9 aa, synthetic construct
  REGION 1..9: note = short peptide
TGKQVVSTL

SEQ ID NO: 166 - protein, 11 aa, synthetic construct
  REGION 1..11: note = short peptide
KSAPATGGVKK

SEQ ID NO: 167 - protein, 8 aa, synthetic construct
  REGION 1..8: note = short peptide
PANRKIGV

SEQ ID NO: 168 - protein, 12 aa, synthetic construct
  REGION 1..12: note = short peptide
PVPDLLVIADKY

SEQ ID NO: 169 - protein, 12 aa, synthetic construct
  REGION 1..12: note = short peptide
KLILQNHILKVK

SEQ ID NO: 170 - protein, 12 aa, synthetic construct
  REGION 1..12: note = short peptide
MLIGVLVLKNGA

SEQ ID NO: 171 - protein, 8 aa, synthetic construct
  REGION 1..8: note = short peptide
KLFGLLVK

SEQ ID NO: 172 - protein, 13 aa, synthetic construct
  REGION 1..13: note = short peptide
KHAVSEGTKAVTK

SEQ ID NO: 173 - protein, 9 aa, synthetic construct
  REGION 1..9: note = short peptide
KHKTGNYKK

SEQ ID NO: 174 - protein, 9 aa, synthetic construct
  REGION 1..9: note = short peptide
KKAREEKQK

SEQ ID NO: 175 - protein, 12 aa, synthetic construct
  REGION 1..12: note = short peptide
KKAKKAGATAGK

SEQ ID NO: 176 - protein, 9 aa, synthetic construct
  REGION 1..9: note = short peptide
KKAFMRGVC

SEQ ID NO: 177 - protein, 14 aa, synthetic construct
  REGION 1..14: note = short peptide
KIDQKAVDSQILPK

SEQ ID NO: 178 - protein, 12 aa, synthetic construct
  REGION 1..12: note = short peptide
KHQKPVLTGQRF

SEQ ID NO: 179 - protein, 10 aa, synthetic construct
  REGION 1..10: note = short peptide
KINVAVKTCK

SEQ ID NO: 180 - protein, 9 aa, synthetic construct
  REGION 1..9: note = short peptide
KQLPGGRIH

SEQ ID NO: 181 - protein, 15 aa, synthetic construct
  REGION 1..15: note = short peptide
SLKYPDENGFDAFLK

SEQ ID NO: 182 - protein, 10 aa, synthetic construct
  REGION 1..10: note = short peptide
SLLPVNPPAI

SEQ ID NO: 183 - protein, 9 aa, synthetic construct
  REGION 1..9: note = short peptide
RLQAHQRVH

SEQ ID NO: 184 - protein, 8 aa, synthetic construct
  REGION 1..8: note = short peptide
RGLRNLPR

SEQ ID NO: 185 - protein, 8 aa, synthetic construct
  REGION 1..8: note = short peptide
RHRKKLYV

SEQ ID NO: 186 - protein, 12 aa, synthetic construct
  REGION 1..12: note = short peptide
KPYALKVLKKTV

SEQ ID NO: 187 - protein, 9 aa, synthetic construct
  REGION 1..9: note = short peptide
VQRKMPCVF

SEQ ID NO: 188 - protein, 10 aa, synthetic construct
  REGION 1..10: note = short peptide
VTGRFNGQFK

SEQ ID NO: 189 - protein, 8 aa, synthetic construct
  REGION 1..8: note = short peptide
SQLKTVCV

SEQ ID NO: 190 - protein, 9 aa, synthetic construct
  REGION 1..9: note = short peptide
SSCLESFVK

SEQ ID NO: 191 - protein, 9 aa, synthetic construct
  REGION 1..9: note = short peptide
SICGKMFKK

SEQ ID NO: 192 - protein, 8 aa, synthetic construct
  REGION 1..8: note = short peptide
VFIQVHCI

SEQ ID NO: 193 - protein, 8 aa, synthetic construct
  REGION 1..8: note = short peptide
TQYILDCV

SEQ ID NO: 194 - protein, 11 aa, synthetic construct
  REGION 1..11: note = short peptide
GTCFKGLNVLK

SEQ ID NO: 195 - protein, 8 aa, synthetic construct
  REGION 1..8: note = short peptide
FYTIHSCF

SEQ ID NO: 196 - protein, 15 aa, synthetic construct
  REGION 1..15: note = short peptide
ILNDLSSDAPGVPRI

SEQ ID NO: 197 - protein, 10 aa, synthetic construct
  REGION 1..10: note = short peptide
ASKDAGCVNK

SEQ ID NO: 198 - protein, 9 aa, synthetic construct
  REGION 1..9: note = short peptide
AQCGKRFSK

SEQ ID NO: 199 - protein, 10 aa, synthetic construct
  REGION 1..10: note = short peptide
ASCVPVNNPK

SEQ ID NO: 200 - protein, 8 aa, synthetic construct
  REGION 1..8: note = short peptide
CQYKQLSV

SEQ ID NO: 201 - protein, 9 aa, synthetic construct
  REGION 1..9: note = short peptide
EQRQFVTCI

SEQ ID NO: 202 - protein, 15 aa, synthetic construct
  REGION 1..15: note = short peptide
RGGYIGSTYFERCLK

SEQ ID NO: 203 - protein, 10 aa, synthetic construct
  REGION 1..10: note = short peptide
LSCPALGISK

SEQ ID NO: 204 - protein, 11 aa, synthetic construct
  REGION 1..11: note = short peptide
SVYTPCDTQNK

SEQ ID NO: 205 - protein, 8 aa, synthetic construct
  REGION 1..8: note = short peptide
KTAQPHPK

SEQ ID NO: 206 - protein, 8 aa, synthetic construct
  REGION 1..8: note = short peptide
KSEQTKSK

SEQ ID NO: 207 - protein, 12 aa, synthetic construct
  REGION 1..12: note = short peptide
KLILQNHILKVK

SEQ ID NO: 208 - protein, 14 aa, synthetic construct
  REGION 1..14: note = short peptide
KIDQKAVDSQILPK

SEQ ID NO: 209 - protein, 15 aa, synthetic construct
  REGION 1..15: note = short peptide
SLKYPDENGFDAFLK

SEQ ID NO: 210 - protein, 9 aa, synthetic construct
  REGION 1..9: note = short peptide
CEPPTGVSL

SEQ ID NO: 211 - protein, 15 aa, synthetic construct
  REGION 1..15: note = short peptide
GSHSMRYFSAAVSRP

SEQ ID NO: 212 - protein, 15 aa, synthetic construct
  REGION 1..15: note = short peptide
RPKDYEVDATLKSLN

SEQ ID NO: 213 - protein, 15 aa, synthetic construct
  REGION 1..15: note = short peptide
RPKDYEVDATLKSLN

SEQ ID NO: 214 - protein, 10 aa, synthetic construct
  REGION 1..10: note = short peptide
KLLEGEECRM

SEQ ID NO: 215 - protein, 15 aa, synthetic construct
  REGION 1..15: note = short peptide
GSHSMRYFSAAVSRP

SEQ ID NO: 216 - protein, 14 aa, synthetic construct
  REGION 1..14: note = short peptide
KEEDEEEDVPGQAK

SEQ ID NO: 217 - protein, 15 aa, synthetic construct
  REGION 1..15: note = short peptide
GKVVSETNDTKVLRH

SEQ ID NO: 218 - protein, 8 aa, synthetic construct
  REGION 1..8: note = short peptide
HVLTDAQK

SEQ ID NO: 219 - protein, 15 aa, synthetic construct
  REGION 1..15: note = short peptide
ALKRINKELSDLARD

SEQ ID NO: 220 - protein, 13 aa, synthetic construct
  REGION 1..13: note = short peptide
SKAHPPELKKFMD

SEQ ID NO: 221 - protein, 14 aa, synthetic construct
  REGION 1..14: note = short peptide
SLKLQASNVTNKND

SEQ ID NO: 222 - protein, 9 aa, synthetic construct
  REGION 1..9: note = short peptide
SPGSPRPAL

SEQ ID NO: 223 - protein, 9 aa, synthetic construct
  REGION 1..9: note = short peptide
YYLNKSVSI

SEQ ID NO: 224 - protein, 12 aa, synthetic construct
  REGION 1..12: note = short peptide
REAKEGDCGDIL

SEQ ID NO: 225 - protein, 15 aa, synthetic construct
  REGION 1..15: note = short peptide
MEINDLASNMETVSK

SEQ ID NO: 226 - protein, 14 aa, synthetic construct
  REGION 1..14: note = short peptide
SLKLQASNVTNKND

SEQ ID NO: 227 - protein, 15 aa, synthetic construct
  REGION 1..15: note = short peptide
PSSGLGVTKQDLGPV

SEQ ID NO: 228 - protein, 13 aa, synthetic construct
  REGION 1..13: note = short peptide
SEKKQPVDLGLLE

SEQ ID NO: 229 - protein, 12 aa, synthetic construct
  REGION 1..12: note = short peptide
ANLMQAEVEELR

SEQ ID NO: 230 - protein, 10 aa, synthetic construct
  REGION 1..10: note = short peptide
VIRGGQVIQI

SEQ ID NO: 231 - protein, 13 aa, synthetic construct
  REGION 1..13: note = short peptide
KLFGQESGPSAEK

SEQ ID NO: 232 - protein, 15 aa, synthetic construct
  REGION 1..15: note = short peptide
PSSGLGVTKQDLGPV

SEQ ID NO: 233 - protein, 10 aa, synthetic construct
  REGION 1..10: note = short peptide
VIRGGQVIQI

SEQ ID NO: 234 - protein, 8 aa, synthetic construct
  REGION 1..8: note = short peptide
HVGHNHTY

SEQ ID NO: 235 - protein, 9 aa, synthetic construct
  REGION 1..9: note = short peptide
KPRPPPLSP

SEQ ID NO: 236 - protein, 11 aa, synthetic construct
  REGION 1..11: note = short peptide
RTINETHNFLF

SEQ ID NO: 237 - protein, 11 aa, synthetic construct
  REGION 1..11: note = short peptide
RPKSGGSGHAV

SEQ ID NO: 238 - protein, 10 aa, synthetic construct
  REGION 1..10: note = short peptide
EELAILIHKL

SEQ ID NO: 239 - protein, 9 aa, synthetic construct
  REGION 1..9: note = short peptide
KTSCPRSNI

SEQ ID NO: 240 - protein, 9 aa, synthetic construct
  REGION 1..9: note = short peptide
ADIRSLVTW

SEQ ID NO: 241 - protein, 9 aa, synthetic construct
  REGION 1..9: note = short peptide
GTMVDVPAL

SEQ ID NO: 242 - protein, 13 aa, synthetic construct
  REGION 1..13: note = short peptide
ADQLTEEQIAEFK

SEQ ID NO: 243 - protein, 14 aa, synthetic construct
  REGION 1..14: note = short peptide
SAQGSDVSLTACKV

SEQ ID NO: 244 - protein, 9 aa, synthetic construct
  REGION 1..9: note = short peptide
APPPPPPPP

SEQ ID NO: 245 - protein, 15 aa, synthetic construct
  REGION 1..15: note = short peptide
TTAFQYIIDNKGIDS

SEQ ID NO: 246 - protein, 11 aa, synthetic construct
  REGION 1..11: note = short peptide
MKTILSNQTVD

SEQ ID NO: 247 - protein, 12 aa, synthetic construct
  REGION 1..12: note = short peptide
MDWVMKHNGPND

SEQ ID NO: 248 - protein, 9 aa, synthetic construct
  REGION 1..9: note = short peptide
AETECRYAL

SEQ ID NO: 249 - protein, 9 aa, synthetic construct
  REGION 1..9: note = short peptide
NYVDCMKKF

SEQ ID NO: 250 - protein, 10 aa, synthetic construct
  REGION 1..10: note = short peptide
SSPRGPGCSL

SEQ ID NO: 251 - protein, 10 aa, synthetic construct
  REGION 1..10: note = short peptide
EECELAKQLY

SEQ ID NO: 252 - protein, 9 aa, synthetic construct
  REGION 1..9: note = short peptide
AVMPHFVCL

SEQ ID NO: 253 - protein, 9 aa, synthetic construct
  REGION 1..9: note = short peptide
GLHTASSCF

SEQ ID NO: 254 - protein, 10 aa, synthetic construct
  REGION 1..10: note = short peptide
EELAILIHKL

SEQ ID NO: 255 - protein, 14 aa, synthetic construct
  REGION 1..14: note = short peptide
SAQGSDVSLTACKV

SEQ ID NO: 256 - protein, 15 aa, synthetic construct
  REGION 1..15: note = short peptide
TTAFQYIIDNKGIDS

SEQ ID NO: 257 - protein, 9 aa, synthetic construct
  REGION 1..9: note = short peptide
KGDLVALSL

SEQ ID NO: 258 - protein, 9 aa, synthetic construct
  REGION 1..9: note = short peptide
KLNATNIEL

SEQ ID NO: 259 - protein, 14 aa, synthetic construct
  REGION 1..14: note = short peptide
KPEGALQNNDGLYD

SEQ ID NO: 260 - protein, 9 aa, synthetic construct
  REGION 1..9: note = short peptide
RASQGISSY

SEQ ID NO: 261 - protein, 9 aa, synthetic construct
  REGION 1..9: note = short peptide
IEHGIITNW

SEQ ID NO: 262 - protein, 9 aa, synthetic construct
  REGION 1..9: note = short peptide
KLLLPGVIK

SEQ ID NO: 263 - protein, 10 aa, synthetic construct
  REGION 1..10: note = short peptide
CCESPVHPGL

SEQ ID NO: 264 - protein, 8 aa, synthetic construct
  REGION 1..8: note = short peptide
FIDLLHDK

SEQ ID NO: 265 - protein, 9 aa, synthetic construct
  REGION 1..9: note = short peptide
APRPPPARL

SEQ ID NO: 266 - protein, 10 aa, synthetic construct
  REGION 1..10: note = short peptide
TLADLTLAQL

SEQ ID NO: 267 - protein, 11 aa, synthetic construct
  REGION 1..11: note = short peptide
QEACEAYLVGL

SEQ ID NO: 268 - protein, 9 aa, synthetic construct
  REGION 1..9: note = short peptide
AEHHKDICL

SEQ ID NO: 269 - protein, 9 aa, synthetic construct
  REGION 1..9: note = short peptide
STKSAICAR

SEQ ID NO: 270 - protein, 10 aa, synthetic construct
  REGION 1..10: note = short peptide
DEADYYCQTW

SEQ ID NO: 271 - protein, 9 aa, synthetic construct
  REGION 1..9: note = short peptide
IEHGIITNW

SEQ ID NO: 272 - protein, 9 aa, synthetic construct
  REGION 1..9: note = short peptide
SPMADRSMM

SEQ ID NO: 273 - protein, 14 aa, synthetic construct
  REGION 1..14: note = short peptide
SPGERGEVGPAGPN

SEQ ID NO: 274 - protein, 11 aa, synthetic construct
  REGION 1..11: note = short peptide
AKISSPTETER

SEQ ID NO: 275 - protein, 15 aa, synthetic construct
  REGION 1..15: note = short peptide
ALKRIHKELNDLARD

SEQ ID NO: 276 - protein, 10 aa, synthetic construct
  REGION 1..10: note = short peptide
KENQNHSYSL

SEQ ID NO: 277 - protein, 10 aa, synthetic construct
  REGION 1..10: note = short peptide
KLLEGEECRM

SEQ ID NO: 278 - protein, 15 aa, synthetic construct
  REGION 1..15: note = short peptide
MDWVMKHNGPNDASD

SEQ ID NO: 279 - protein, 12 aa, synthetic construct
  REGION 1..12: note = short peptide
LRLCDPSAPLAF

SEQ ID NO: 280 - protein, 9 aa, synthetic construct
  REGION 1..9: note = short peptide
ATDTSFKNK

SEQ ID NO: 281 - protein, 8 aa, synthetic construct
  REGION 1..8: note = short peptide
DLIKKHIL

SEQ ID NO: 282 - protein, 9 aa, synthetic construct
  REGION 1..9: note = short peptide
TGLSPKASL

SEQ ID NO: 283 - protein, 9 aa, synthetic construct
  REGION 1..9: note = short peptide
RVLPSNYNF

SEQ ID NO: 284 - protein, 9 aa, synthetic construct
  REGION 1..9: note = short peptide
YPDRIMNTF

SEQ ID NO: 285 - protein, 9 aa, synthetic construct
  REGION 1..9: note = short peptide
KVKRAVVQV

SEQ ID NO: 286 - protein, 11 aa, synthetic construct
  REGION 1..11: note = short peptide
PSSRGGCSIKM

SEQ ID NO: 287 - protein, 10 aa, synthetic construct
  REGION 1..10: note = short peptide
SAIQNLHSFD

SEQ ID NO: 288 - protein, 15 aa, synthetic construct
  REGION 1..15: note = short peptide
GHQQLYWSHPRKFGQ

SEQ ID NO: 289 - protein, 10 aa, synthetic construct
  REGION 1..10: note = short peptide
RYVNNYTNSF

SEQ ID NO: 290 - protein, 9 aa, synthetic construct
  REGION 1..9: note = short peptide
RLLEGNFSL

SEQ ID NO: 291 - protein, 9 aa, synthetic construct
  REGION 1..9: note = short peptide
KSPAKPKAV

SEQ ID NO: 292 - protein, 9 aa, synthetic construct
  REGION 1..9: note = short peptide
RQKELESNY

SEQ ID NO: 293 - protein, 10 aa, synthetic construct
  REGION 1..10: note = short peptide
RQAPGKGLEY

SEQ ID NO: 294 - protein, 14 aa, synthetic construct
  REGION 1..14: note = short peptide
AGKQAVSASGKWLD

SEQ ID NO: 295 - protein, 14 aa, synthetic construct
  REGION 1..14: note = short peptide
AGKQAVSASGKWLD

SEQ ID NO: 296 - protein, 9 aa, synthetic construct
  REGION 1..9: note = short peptide
PAPPPPPPP

SEQ ID NO: 297 - protein, 9 aa, synthetic construct
  REGION 1..9: note = short peptide
NEYPNITRL

SEQ ID NO: 298 - protein, 10 aa, synthetic construct
  REGION 1..10: note = short peptide
KRCSCSSLMD

SEQ ID NO: 299 - protein, 9 aa, synthetic construct
  REGION 1..9: note = short peptide
NTDEPPMVF

SEQ ID NO: 300 - protein, 9 aa, synthetic construct
  REGION 1..9: note = short peptide
KYFEKQFEL

SEQ ID NO: 301 - protein, 9 aa, synthetic construct
  REGION 1..9: note = short peptide
SFDSGSVRL

SEQ ID NO: 302 - protein, 9 aa, synthetic construct
  REGION 1..9: note = short peptide
NAAKVFNLY

SEQ ID NO: 303 - protein, 10 aa, synthetic construct
  REGION 1..10: note = short peptide
SNAACAALDK

SEQ ID NO: 304 - protein, 13 aa, synthetic construct
  REGION 1..13: note = short peptide
NTGIICTIGPASR

SEQ ID NO: 305 - protein, 10 aa, synthetic construct
  REGION 1..10: note = short peptide
SMSVYCSPAK

SEQ ID NO: 306 - protein, 13 aa, synthetic construct
  REGION 1..13: note = short peptide
PNMVTPGHACTQK

SEQ ID NO: 307 - protein, 9 aa, synthetic construct
  REGION 1..9: note = short peptide
AETECRYAL

SEQ ID NO: 308 - protein, 11 aa, synthetic construct
  REGION 1..11: note = short peptide
AETECRYATQL

SEQ ID NO: 309 - protein, 10 aa, synthetic construct
  REGION 1..10: note = short peptide
VEDPETGLCL

SEQ ID NO: 310 - protein, 9 aa, synthetic construct
  REGION 1..9: note = short peptide
TYCQNIKEF

SEQ ID NO: 311 - protein, 9 aa, synthetic construct
  REGION 1..9: note = short peptide
GDLCRICQM

SEQ ID NO: 312 - protein, 9 aa, synthetic construct
  REGION 1..9: note = short peptide
QEQPGTACL

SEQ ID NO: 313 - protein, 11 aa, synthetic construct
  REGION 1..11: note = short peptide
RKLEDECSELK

SEQ ID NO: 314 - protein, 10 aa, synthetic construct
  REGION 1..10: note = short peptide
AENEPENACL

SEQ ID NO: 315 - protein, 11 aa, synthetic construct
  REGION 1..11: note = short peptide
NEIDDTCSSFL

SEQ ID NO: 316 - protein, 9 aa, synthetic construct
  REGION 1..9: note = short peptide
KWVPCSAKF

SEQ ID NO: 317 - protein, 9 aa, synthetic construct
  REGION 1..9: note = short peptide
LEDECSELK

SEQ ID NO: 318 - protein, 11 aa, synthetic construct
  REGION 1..11: note = short peptide
VPVSDMNGLGF

SEQ ID NO: 319 - protein, 8 aa, synthetic construct
  REGION 1..8: note = short peptide
DRHCNMVL

SEQ ID NO: 320 - protein, 10 aa, synthetic construct
  REGION 1..10: note = short peptide
SEEELAECFR

SEQ ID NO: 321 - protein, 8 aa, synthetic construct
  REGION 1..8: note = short peptide
QVQLVESG

SEQ ID NO: 322 - protein, 12 aa, synthetic construct
  REGION 1..12: note = short peptide
VIGSGCNLDSAR

SEQ ID NO: 323 - protein, 10 aa, synthetic construct
  REGION 1..10: note = short peptide
AEQAAAIVCL

SEQ ID NO: 324 - protein, 9 aa, synthetic construct
  REGION 1..9: note = short peptide
ADSIRICDF

SEQ ID NO: 325 - protein, 9 aa, synthetic construct
  REGION 1..9: note = short peptide
CNGVLEGIR

SEQ ID NO: 326 - protein, 9 aa, synthetic construct
  REGION 1..9: note = short peptide
CNGVLEGIR

SEQ ID NO: 327 - protein, 11 aa, synthetic construct
  REGION 1..11: note = short peptide
TEIQQVNSNCL

SEQ ID NO: 328 - protein, 8 aa, synthetic construct
  REGION 1..8: note = short peptide
TQELQQAK

SEQ ID NO: 329 - protein, 12 aa, synthetic construct
  REGION 1..12: note = short peptide
NICYVITHGDAK

SEQ ID NO: 330 - protein, 9 aa, synthetic construct
  REGION 1..9: note = short peptide
KAQCPIVER

SEQ ID NO: 331 - protein, 10 aa, synthetic construct
  REGION 1..10: note = short peptide
ATNGAHVNHR

SEQ ID NO: 332 - protein, 14 aa, synthetic construct
  REGION 1..14: note = short peptide
SPGERGEVGPAGPN

SEQ ID NO: 333 - protein, 10 aa, synthetic construct
  REGION 1..10: note = short peptide
KLLEGEECRM

SEQ ID NO: 334 - protein, 12 aa, synthetic construct
  REGION 1..12: note = short peptide
LRLCDPSAPLAF

SEQ ID NO: 335 - protein, 9 aa, synthetic construct
  REGION 1..9: note = short peptide
KVKRAVVQV

SEQ ID NO: 336 - protein, 14 aa, synthetic construct
  REGION 1..14: note = short peptide
AGKQAVSASGKWLD

SEQ ID NO: 337 - protein, 14 aa, synthetic construct
  REGION 1..14: note = short peptide
AGKQAVSASGKWLD

SEQ ID NO: 338 - protein, 9 aa, synthetic construct
  REGION 1..9: note = short peptide
CNGVLEGIR

SEQ ID NO: 339 - protein, 9 aa, synthetic construct
  REGION 1..9: note = short peptide
CNGVLEGIR

SEQ ID NO: 340 - protein, 9 aa, synthetic construct
  REGION 1..9: note = short peptide
CNGVLEGIR

SEQ ID NO: 341 - protein, 9 aa, synthetic construct
  REGION 1..9: note = short peptide
CNGVLEGIR

SEQ ID NO: 342 - protein, 8 aa, synthetic construct
  REGION 1..8: note = short peptide
LPPEVRAQ

SEQ ID NO: 343 - protein, 9 aa, synthetic construct
  REGION 1..9: note = short peptide
VPEHPALPT

SEQ ID NO: 344 - protein, 9 aa, synthetic construct
  REGION 1..9: note = short peptide
LPSPHPVRY

SEQ ID NO: 345 - protein, 15 aa, synthetic construct
  REGION 1..15: note = short peptide
KTDQAQKAEGAGDAK

SEQ ID NO: 346 - protein, 8 aa, synthetic construct
  REGION 1..8: note = short peptide
TTKSFLRN

SEQ ID NO: 347 - protein, 15 aa, synthetic construct
  REGION 1..15: note = short peptide
YKDPLFKKLEQLKEV

SEQ ID NO: 348 - protein, 10 aa, synthetic construct
  REGION 1..10: note = short peptide
VFADYEDYIK

SEQ ID NO: 349 - protein, 9 aa, synthetic construct
  REGION 1..9: note = short peptide
KYIDQKFVL

SEQ ID NO: 350 - protein, 13 aa, synthetic construct
  REGION 1..13: note = short peptide
VAKKKDKVKKGGP

SEQ ID NO: 351 - protein, 9 aa, synthetic construct
  REGION 1..9: note = short peptide
KVYTPVASR

SEQ ID NO: 352 - protein, 11 aa, synthetic construct
  REGION 1..11: note = short peptide
KYQEVTNNLEF

SEQ ID NO: 353 - protein, 10 aa, synthetic construct
  REGION 1..10: note = short peptide
TYIGLSNILC

SEQ ID NO: 354 - protein, 9 aa, synthetic construct
  REGION 1..9: note = short peptide
VLADNKLVI

SEQ ID NO: 355 - protein, 11 aa, synthetic construct
  REGION 1..11: note = short peptide
SGPPGPPGPAG

SEQ ID NO: 356 - protein, 9 aa, synthetic construct
  REGION 1..9: note = short peptide
SAFADRPAF

SEQ ID NO: 357 - protein, 15 aa, synthetic construct
  REGION 1..15: note = short peptide
SAGPPPTGEEDTAEK

SEQ ID NO: 358 - protein, 10 aa, synthetic construct
  REGION 1..10: note = short peptide
PAEYNLRSRT

SEQ ID NO: 359 - protein, 10 aa, synthetic construct
  REGION 1..10: note = short peptide
SIAEQILATL

SEQ ID NO: 360 - protein, 8 aa, synthetic construct
  REGION 1..8: note = short peptide
SKMEFMTI

SEQ ID NO: 361 - protein, 9 aa, synthetic construct
  REGION 1..9: note = short peptide
RPSSAPDLM

SEQ ID NO: 362 - protein, 9 aa, synthetic construct
  REGION 1..9: note = short peptide
RQSSATSSF

SEQ ID NO: 363 - protein, 11 aa, synthetic construct
  REGION 1..11: note = short peptide
RKKGENVEALR

SEQ ID NO: 364 - protein, 10 aa, synthetic construct
  REGION 1..10: note = short peptide
RPGPPGPPGA

SEQ ID NO: 365 - protein, 11 aa, synthetic construct
  REGION 1..11: note = short peptide
RDYQELMNVKL

SEQ ID NO: 366 - protein, 13 aa, synthetic construct
  REGION 1..13: note = short peptide
RRYNQSEAGSHTL

SEQ ID NO: 367 - protein, 10 aa, synthetic construct
  REGION 1..10: note = short peptide
RSGEGFLCVF

SEQ ID NO: 368 - protein, 9 aa, synthetic construct
  REGION 1..9: note = short peptide
QYNTTIAHV

SEQ ID NO: 369 - protein, 15 aa, synthetic construct
  REGION 1..15: note = short peptide
MSLKLQASNVTNKND

SEQ ID NO: 370 - protein, 9 aa, synthetic construct
  REGION 1..9: note = short peptide
SNKMGMQSF

SEQ ID NO: 371 - protein, 9 aa, synthetic construct
  REGION 1..9: note = short peptide
LYNFTGEQM

SEQ ID NO: 372 - protein, 9 aa, synthetic construct
  REGION 1..9: note = short peptide
MNVFNTDVR

SEQ ID NO: 373 - protein, 12 aa, synthetic construct
  REGION 1..12: note = short peptide
MNNKFDALKDDD

SEQ ID NO: 374 - protein, 11 aa, synthetic construct
  REGION 1..11: note = short peptide
MNNKFDALKDD

SEQ ID NO: 375 - protein, 9 aa, synthetic construct
  REGION 1..9: note = short peptide
TNFTKIASF

SEQ ID NO: 376 - protein, 9 aa, synthetic construct
  REGION 1..9: note = short peptide
SPSLFANKF

SEQ ID NO: 377 - protein, 10 aa, synthetic construct
  REGION 1..10: note = short peptide
TAAKRDLALV

SEQ ID NO: 378 - protein, 8 aa, synthetic construct
  REGION 1..8: note = short peptide
HDYAKAAF

SEQ ID NO: 379 - protein, 9 aa, synthetic construct
  REGION 1..9: note = short peptide
HADKPVATY

SEQ ID NO: 380 - protein, 9 aa, synthetic construct
  REGION 1..9: note = short peptide
GEMPRHMQL

SEQ ID NO: 381 - protein, 14 aa, synthetic construct
  REGION 1..14: note = short peptide
GEAGRPGEAGLPGA

SEQ ID NO: 382 - protein, 11 aa, synthetic construct
  REGION 1..11: note = short peptide
GAASGVPHPAA

SEQ ID NO: 383 - protein, 13 aa, synthetic construct
  REGION 1..13: note = short peptide
GQTDDPGPLDGPD

SEQ ID NO: 384 - protein, 13 aa, synthetic construct
  REGION 1..13: note = short peptide
GQCSEICGANHSF

SEQ ID NO: 385 - protein, 12 aa, synthetic construct
  REGION 1..12: note = short peptide
GMNGVINRNETI

SEQ ID NO: 386 - protein, 9 aa, synthetic construct
  REGION 1..9: note = short peptide
GLVSSIHII

SEQ ID NO: 387 - protein, 10 aa, synthetic construct
  REGION 1..10: note = short peptide
ICSRIGITNY

SEQ ID NO: 388 - protein, 9 aa, synthetic construct
  REGION 1..9: note = short peptide
KLNNRQLNY

SEQ ID NO: 389 - protein, 9 aa, synthetic construct
  REGION 1..9: note = short peptide
IYQYIQSRF

SEQ ID NO: 390 - protein, 15 aa, synthetic construct
  REGION 1..15: note = short peptide
KGILRQITVNDLPVG

SEQ ID NO: 391 - protein, 9 aa, synthetic construct
  REGION 1..9: note = short peptide
KFVQDTSKF

SEQ ID NO: 392 - protein, 8 aa, synthetic construct
  REGION 1..8: note = short peptide
KFRKKKLR

SEQ ID NO: 393 - protein, 9 aa, synthetic construct
  REGION 1..9: note = short peptide
KEMLPHVGV

SEQ ID NO: 394 - protein, 11 aa, synthetic construct
  REGION 1..11: note = short peptide
KEGNGTSNSTL

SEQ ID NO: 395 - protein, 10 aa, synthetic construct
  REGION 1..10: note = short peptide
APQTQHVSPM

SEQ ID NO: 396 - protein, 13 aa, synthetic construct
  REGION 1..13: note = short peptide
APGDRGEPGPPGP

SEQ ID NO: 397 - protein, 13 aa, synthetic construct
  REGION 1..13: note = short peptide
AVMDSDTTGKLGF

SEQ ID NO: 398 - protein, 9 aa, synthetic construct
  REGION 1..9: note = short peptide
ATDTSFKNK

SEQ ID NO: 399 - protein, 9 aa, synthetic construct
  REGION 1..9: note = short peptide
AQRPGPMEL

SEQ ID NO: 400 - protein, 10 aa, synthetic construct
  REGION 1..10: note = short peptide
EYPDRIMNTF

SEQ ID NO: 401 - protein, 13 aa, synthetic construct
  REGION 1..13: note = short peptide
EVGPRGLPGEPGP

SEQ ID NO: 402 - protein, 9 aa, synthetic construct
  REGION 1..9: note = short peptide
FLICTFLFL

SEQ ID NO: 403 - protein, 15 aa, synthetic construct
  REGION 1..15: note = short peptide
DGTFQKWASVVVPSG

SEQ ID NO: 404 - protein, 11 aa, synthetic construct
  REGION 1..11: note = short peptide
EELEQEPEPEP

SEQ ID NO: 405 - protein, 9 aa, synthetic construct
  REGION 1..9: note = short peptide
KRNSMEPGF

SEQ ID NO: 406 - protein, 9 aa, synthetic construct
  REGION 1..9: note = short peptide
KQLATREAM

SEQ ID NO: 407 - protein, 9 aa, synthetic construct
  REGION 1..9: note = short peptide
AEPPQCTSL

SEQ ID NO: 408 - protein, 9 aa, synthetic construct
  REGION 1..9: note = short peptide
TPAAADICF

SEQ ID NO: 409 - protein, 9 aa, synthetic construct
  REGION 1..9: note = short peptide
IEHEGQECL

SEQ ID NO: 410 - protein, 8 aa, synthetic construct
  REGION 1..8: note = short peptide
TQHCITTM

SEQ ID NO: 411 - protein, 10 aa, synthetic construct
  REGION 1..10: note = short peptide
TEDCHNAFAL

SEQ ID NO: 412 - protein, 10 aa, synthetic construct
  REGION 1..10: note = short peptide
KEAELQCTQL

SEQ ID NO: 413 - protein, 10 aa, synthetic construct
  REGION 1..10: note = short peptide
KEALENCITL

SEQ ID NO: 414 - protein, 9 aa, synthetic construct
  REGION 1..9: note = short peptide
MDPPRNCAF

SEQ ID NO: 415 - protein, 8 aa, synthetic construct
  REGION 1..8: note = short peptide
AGMKVCQF

SEQ ID NO: 416 - protein, 13 aa, synthetic construct
  REGION 1..13: note = short peptide
TGTLTTNQMSVCK

SEQ ID NO: 417 - protein, 9 aa, synthetic construct
  REGION 1..9: note = short peptide
CEVDNELRI

SEQ ID NO: 418 - protein, 9 aa, synthetic construct
  REGION 1..9: note = short peptide
QAMQFGQLL

SEQ ID NO: 419 - protein, 9 aa, synthetic construct
  REGION 1..9: note = short peptide
VDNPHVCRL

SEQ ID NO: 420 - protein, 9 aa, synthetic construct
  REGION 1..9: note = short peptide
RGYAQSCRF

SEQ ID NO: 421 - protein, 9 aa, synthetic construct
  REGION 1..9: note = short peptide
SEDALCTVL

SEQ ID NO: 422 - protein, 10 aa, synthetic construct
  REGION 1..10: note = short peptide
AEAGASLQAY

SEQ ID NO: 423 - protein, 9 aa, synthetic construct
  REGION 1..9: note = short peptide
PLNGNHTGY

SEQ ID NO: 424 - protein, 12 aa, synthetic construct
  REGION 1..12: note = short peptide
RQKTIDTKTNCR

SEQ ID NO: 425 - protein, 9 aa, synthetic construct
  REGION 1..9: note = short peptide
TYVPCLKTL

SEQ ID NO: 426 - protein, 10 aa, synthetic construct
  REGION 1..10: note = short peptide
EVTGSIQLCR

SEQ ID NO: 427 - protein, 12 aa, synthetic construct
  REGION 1..12: note = short peptide
RALANSLACQGK

SEQ ID NO: 428 - protein, 10 aa, synthetic construct
  REGION 1..10: note = short peptide
VFEPNNPVCF

SEQ ID NO: 429 - protein, 9 aa, synthetic construct
  REGION 1..9: note = short peptide
SEVDGDCSL

SEQ ID NO: 430 - protein, 9 aa, synthetic construct
  REGION 1..9: note = short peptide
HGINCFINR

SEQ ID NO: 431 - protein, 9 aa, synthetic construct
  REGION 1..9: note = short peptide
DRLVLICSV

SEQ ID NO: 432 - protein, 9 aa, synthetic construct
  REGION 1..9: note = short peptide
SACKESQVY

SEQ ID NO: 433 - protein, 9 aa, synthetic construct
  REGION 1..9: note = short peptide
AELELGTCF

SEQ ID NO: 434 - protein, 11 aa, synthetic construct
  REGION 1..11: note = short peptide
NEIDDTCSSFL

SEQ ID NO: 435 - protein, 8 aa, synthetic construct
  REGION 1..8: note = short peptide
DRTFHCEI

SEQ ID NO: 436 - protein, 8 aa, synthetic construct
  REGION 1..8: note = short peptide
KQRVMTCF

SEQ ID NO: 437 - protein, 11 aa, synthetic construct
  REGION 1..11: note = short peptide
KQNEFRDDACR

SEQ ID NO: 438 - protein, 13 aa, synthetic construct
  REGION 1..13: note = short peptide
IIYGGSVTGATCK

SEQ ID NO: 439 - protein, 10 aa, synthetic construct
  REGION 1..10: note = short peptide
GNAGGLHHHR

SEQ ID NO: 440 - protein, 9 aa, synthetic construct
  REGION 1..9: note = short peptide
ALARLSCAF

SEQ ID NO: 441 - protein, 10 aa, synthetic construct
  REGION 1..10: note = short peptide
RSGEGFLCVF

SEQ ID NO: 442 - protein, 13 aa, synthetic construct
  REGION 1..13: note = short peptide
GQTDDPGPLDGPD

SEQ ID NO: 443 - protein, 13 aa, synthetic construct
  REGION 1..13: note = short peptide
GQCSEICGANHSF

SEQ ID NO: 444 - protein, 9 aa, synthetic construct
  REGION 1..9: note = short peptide
KFVQDTSKF

SEQ ID NO: 445 - protein, 8 aa, synthetic construct
  REGION 1..8: note = short peptide
KTSTTSKG

SEQ ID NO: 446 - protein, 9 aa, synthetic construct
  REGION 1..9: note = short peptide
RPRVAVRSA

SEQ ID NO: 447 - protein, 9 aa, synthetic construct
  REGION 1..9: note = short peptide
GVQGPPGPA

SEQ ID NO: 448 - protein, 13 aa, synthetic construct
  REGION 1..13: note = short peptide
AVMDSDTTGKLGF

SEQ ID NO: 449 - protein, 9 aa, synthetic construct
  REGION 1..9: note = short peptide
AVKVKHVKR

SEQ ID NO: 450 - protein, 12 aa, synthetic construct
  REGION 1..12: note = short peptide
RPDGEKKAYVRL

SEQ ID NO: 451 - protein, 9 aa, synthetic construct
  REGION 1..9: note = short peptide
KYPNVFKKI

SEQ ID NO: 452 - protein, 9 aa, synthetic construct
  REGION 1..9: note = short peptide
RMCDYKHHW

SEQ ID NO: 453 - protein, 9 aa, synthetic construct
  REGION 1..9: note = short peptide
RQIDDIVTL

SEQ ID NO: 454 - protein, 11 aa, synthetic construct
  REGION 1..11: note = short peptide
KYLDEDTIYHL

SEQ ID NO: 455 - protein, 11 aa, synthetic construct
  REGION 1..11: note = short peptide
RSKSKSSSVSR

SEQ ID NO: 456 - protein, 14 aa, synthetic construct
  REGION 1..14: note = short peptide
GQDGRPGPPGPPGA

SEQ ID NO: 457 - protein, 15 aa, synthetic construct
  REGION 1..15: note = short peptide
DASKGDDLLPAGTED

SEQ ID NO: 458 - protein, 15 aa, synthetic construct
  REGION 1..15: note = short peptide
GPSGPQGPGGPPGPK

SEQ ID NO: 459 - protein, 13 aa, synthetic construct
  REGION 1..13: note = short peptide
GPSTGVRQGSHHE

SEQ ID NO: 460 - protein, 12 aa, synthetic construct
  REGION 1..12: note = short peptide
GQAGVMGFPGPK

SEQ ID NO: 461 - protein, 10 aa, synthetic construct
  REGION 1..10: note = short peptide
CYAFNGTQRF

SEQ ID NO: 462 - protein, 9 aa, synthetic construct
  REGION 1..9: note = short peptide
GQAPRALIY

SEQ ID NO: 463 - protein, 11 aa, synthetic construct
  REGION 1..11: note = short peptide
RQEPSQGTTTF

SEQ ID NO: 464 - protein, 8 aa, synthetic construct
  REGION 1..8: note = short peptide
GSFLSKDF

SEQ ID NO: 465 - protein, 11 aa, synthetic construct
  REGION 1..11: note = short peptide
GSKSQDPNPQY

SEQ ID NO: 466 - protein, 15 aa, synthetic construct
  REGION 1..15: note = short peptide
CGKIEVEKPFAIAKE

SEQ ID NO: 467 - protein, 15 aa, synthetic construct
  REGION 1..15: note = short peptide
CGKIEVEKPFAIAKE

SEQ ID NO: 468 - protein, 9 aa, synthetic construct
  REGION 1..9: note = short peptide
QSFYTPRSN

SEQ ID NO: 469 - protein, 15 aa, synthetic construct
  REGION 1..15: note = short peptide
QVQLVESGGGLVKPG

SEQ ID NO: 470 - protein, 9 aa, synthetic construct
  REGION 1..9: note = short peptide
QYLKSVQLF

SEQ ID NO: 471 - protein, 13 aa, synthetic construct
  REGION 1..13: note = short peptide
QGYCAEHPEGGIC

SEQ ID NO: 472 - protein, 10 aa, synthetic construct
  REGION 1..10: note = short peptide
TTRPPPAQSP

SEQ ID NO: 473 - protein, 9 aa, synthetic construct
  REGION 1..9: note = short peptide
QGSGVPSRF

SEQ ID NO: 474 - protein, 8 aa, synthetic construct
  REGION 1..8: note = short peptide
QHLLYVYL

SEQ ID NO: 475 - protein, 9 aa, synthetic construct
  REGION 1..9: note = short peptide
QPLDGLKTY

SEQ ID NO: 476 - protein, 13 aa, synthetic construct
  REGION 1..13: note = short peptide
LAQESTMDTENDK

SEQ ID NO: 477 - protein, 9 aa, synthetic construct
  REGION 1..9: note = short peptide
HYKPTPLYF

SEQ ID NO: 478 - protein, 11 aa, synthetic construct
  REGION 1..11: note = short peptide
RIAEPSVCGRC

SEQ ID NO: 479 - protein, 15 aa, synthetic construct
  REGION 1..15: note = short peptide
TNQYGILFKQEQAHD

SEQ ID NO: 480 - protein, 9 aa, synthetic construct
  REGION 1..9: note = short peptide
HPMQPVSVN

SEQ ID NO: 481 - protein, 10 aa, synthetic construct
  REGION 1..10: note = short peptide
RETPPNPAGL

SEQ ID NO: 482 - protein, 15 aa, synthetic construct
  REGION 1..15: note = short peptide
DATKGDDLLPAGTED

SEQ ID NO: 483 - protein, 11 aa, synthetic construct
  REGION 1..11: note = short peptide
RTMPLLSLHSR

SEQ ID NO: 484 - protein, 13 aa, synthetic construct
  REGION 1..13: note = short peptide
SLKLQASNVTNKN

SEQ ID NO: 485 - protein, 12 aa, synthetic construct
  REGION 1..12: note = short peptide
KQTALVELVKHK

SEQ ID NO: 486 - protein, 14 aa, synthetic construct
  REGION 1..14: note = short peptide
SLKLQASNVTNKND

SEQ ID NO: 487 - protein, 12 aa, synthetic construct
  REGION 1..12: note = short peptide
SLPLVDTHSKRT

SEQ ID NO: 488 - protein, 8 aa, synthetic construct
  REGION 1..8: note = short peptide
KRKFIKKR

SEQ ID NO: 489 - protein, 13 aa, synthetic construct
  REGION 1..13: note = short peptide
DVPPPPMEPDHPF

SEQ ID NO: 490 - protein, 15 aa, synthetic construct
  REGION 1..15: note = short peptide
KVQWKVDNALQSGNS

SEQ ID NO: 491 - protein, 14 aa, synthetic construct
  REGION 1..14: note = short peptide
SLKLQASNVTNKND

SEQ ID NO: 492 - protein, 9 aa, synthetic construct
  REGION 1..9: note = short peptide
FPDRIMNTF

SEQ ID NO: 493 - protein, 13 aa, synthetic construct
  REGION 1..13: note = short peptide
SHHSHTTSQGRSD

SEQ ID NO: 494 - protein, 14 aa, synthetic construct
  REGION 1..14: note = short peptide
SKNTVSSARFRKVD

SEQ ID NO: 495 - protein, 10 aa, synthetic construct
  REGION 1..10: note = short peptide
STSAGLKYPG

SEQ ID NO: 496 - protein, 11 aa, synthetic construct
  REGION 1..11: note = short peptide
SPRAPVSPLKF

SEQ ID NO: 497 - protein, 13 aa, synthetic construct
  REGION 1..13: note = short peptide
SPPETTTTAQETS

SEQ ID NO: 498 - protein, 10 aa, synthetic construct
  REGION 1..10: note = short peptide
EELAILIHKL

SEQ ID NO: 499 - protein, 14 aa, synthetic construct
  REGION 1..14: note = short peptide
EAPYQNVTEFDGQD

SEQ ID NO: 500 - protein, 11 aa, synthetic construct
  REGION 1..11: note = short peptide
ESAIAIATGKM

SEQ ID NO: 501 - protein, 12 aa, synthetic construct
  REGION 1..12: note = short peptide
EPMTVSSDQMAK

SEQ ID NO: 502 - protein, 9 aa, synthetic construct
  REGION 1..9: note = short peptide
EQMKQLSDF

SEQ ID NO: 503 - protein, 8 aa, synthetic construct
  REGION 1..8: note = short peptide
EDFDVKTY

SEQ ID NO: 504 - protein, 9 aa, synthetic construct
  REGION 1..9: note = short peptide
DGELLHGIL

SEQ ID NO: 505 - protein, 13 aa, synthetic construct
  REGION 1..13: note = short peptide
RYISKYELDKAFS

SEQ ID NO: 506 - protein, 9 aa, synthetic construct
  REGION 1..9: note = short peptide
DETLSTLRY

SEQ ID NO: 507 - protein, 9 aa, synthetic construct
  REGION 1..9: note = short peptide
DETISTLRY

SEQ ID NO: 508 - protein, 9 aa, synthetic construct
  REGION 1..9: note = short peptide
GEYTLVVKW

SEQ ID NO: 509 - protein, 10 aa, synthetic construct
  REGION 1..10: note = short peptide
GFVASINLTL

SEQ ID NO: 510 - protein, 9 aa, synthetic construct
  REGION 1..9: note = short peptide
RVFLPNKQR

SEQ ID NO: 511 - protein, 13 aa, synthetic construct
  REGION 1..13: note = short peptide
TESSPGSRQIQLW

SEQ ID NO: 512 - protein, 9 aa, synthetic construct
  REGION 1..9: note = short peptide
KYIKDDFRF

SEQ ID NO: 513 - protein, 9 aa, synthetic construct
  REGION 1..9: note = short peptide
KRYKSIVKY

SEQ ID NO: 514 - protein, 11 aa, synthetic construct
  REGION 1..11: note = short peptide
DELTLEGIKQF

SEQ ID NO: 515 - protein, 9 aa, synthetic construct
  REGION 1..9: note = short peptide
KQAIKSLNF

SEQ ID NO: 516 - protein, 9 aa, synthetic construct
  REGION 1..9: note = short peptide
DRFQPNMTL

SEQ ID NO: 517 - protein, 12 aa, synthetic construct
  REGION 1..12: note = short peptide
SFLKAVPSQKRT

SEQ ID NO: 518 - protein, 14 aa, synthetic construct
  REGION 1..14: note = short peptide
FVYPWVPPPIPSPH

SEQ ID NO: 519 - protein, 9 aa, synthetic construct
  REGION 1..9: note = short peptide
SFDVVTKCV

SEQ ID NO: 520 - protein, 11 aa, synthetic construct
  REGION 1..11: note = short peptide
GEPGPPGPAGA

SEQ ID NO: 521 - protein, 12 aa, synthetic construct
  REGION 1..12: note = short peptide
GDVPSVGLEGPD

SEQ ID NO: 522 - protein, 8 aa, synthetic construct
  REGION 1..8: note = short peptide
GEHEVRVL

SEQ ID NO: 523 - protein, 9 aa, synthetic construct
  REGION 1..9: note = short peptide
GENDVIGCF

SEQ ID NO: 524 - protein, 8 aa, synthetic construct
  REGION 1..8: note = short peptide
GENIKQIF

SEQ ID NO: 525 - protein, 10 aa, synthetic construct
  REGION 1..10: note = short peptide
TAAAKTGAPG

SEQ ID NO: 526 - protein, 8 aa, synthetic construct
  REGION 1..8: note = short peptide
DLYDAGVK

SEQ ID NO: 527 - protein, 9 aa, synthetic construct
  REGION 1..9: note = short peptide
GAPGFPGAR

SEQ ID NO: 528 - protein, 15 aa, synthetic construct
  REGION 1..15: note = short peptide
GAPGIAGAPGFPGAR

SEQ ID NO: 529 - protein, 9 aa, synthetic construct
  REGION 1..9: note = short peptide
SEMQRHYVM

SEQ ID NO: 530 - protein, 8 aa, synthetic construct
  REGION 1..8: note = short peptide
LFLLPSLK

SEQ ID NO: 531 - protein, 9 aa, synthetic construct
  REGION 1..9: note = short peptide
LYWSHPRKF

SEQ ID NO: 532 - protein, 10 aa, synthetic construct
  REGION 1..10: note = short peptide
MADIASGMEY

SEQ ID NO: 533 - protein, 9 aa, synthetic construct
  REGION 1..9: note = short peptide
MSSLPSSKL

SEQ ID NO: 534 - protein, 12 aa, synthetic construct
  REGION 1..12: note = short peptide
LYIGWAATALLM

SEQ ID NO: 535 - protein, 14 aa, synthetic construct
  REGION 1..14: note = short peptide
VLSALQAGNKGTQA

SEQ ID NO: 536 - protein, 11 aa, synthetic construct
  REGION 1..11: note = short peptide
KLLEGEECRMS

SEQ ID NO: 537 - protein, 10 aa, synthetic construct
  REGION 1..10: note = short peptide
KLLEGEECRM

SEQ ID NO: 538 - protein, 10 aa, synthetic construct
  REGION 1..10: note = short peptide
AGLNSLEAVK

SEQ ID NO: 539 - protein, 9 aa, synthetic construct
  REGION 1..9: note = short peptide
KESTLHLVL

SEQ ID NO: 540 - protein, 9 aa, synthetic construct
  REGION 1..9: note = short peptide
KDDPAITLL

SEQ ID NO: 541 - protein, 9 aa, synthetic construct
  REGION 1..9: note = short peptide
LSSPVTKSF

SEQ ID NO: 542 - protein, 14 aa, synthetic construct
  REGION 1..14: note = short peptide
AKSKNHTTHNQSRK

SEQ ID NO: 543 - protein, 10 aa, synthetic construct
  REGION 1..10: note = short peptide
AAVTMSVPGR

SEQ ID NO: 544 - protein, 15 aa, synthetic construct
  REGION 1..15: note = short peptide
ALKRIHKELNDLARD

SEQ ID NO: 545 - protein, 10 aa, synthetic construct
  REGION 1..10: note = short peptide
KLNPYAKTMR

SEQ ID NO: 546 - protein, 9 aa, synthetic construct
  REGION 1..9: note = short peptide
KDLPEGWSL

SEQ ID NO: 547 - protein, 12 aa, synthetic construct
  REGION 1..12: note = short peptide
NEINATGHQQTL

SEQ ID NO: 548 - protein, 9 aa, synthetic construct
  REGION 1..9: note = short peptide
KDLVQDCGF

SEQ ID NO: 549 - protein, 8 aa, synthetic construct
  REGION 1..8: note = short peptide
KKMKRGSF

SEQ ID NO: 550 - protein, 10 aa, synthetic construct
  REGION 1..10: note = short peptide
AELEKLEEAF

SEQ ID NO: 551 - protein, 10 aa, synthetic construct
  REGION 1..10: note = short peptide
AELDRQIKSF

SEQ ID NO: 552 - protein, 10 aa, synthetic construct
  REGION 1..10: note = short peptide
MNNKFDALKD

SEQ ID NO: 553 - protein, 11 aa, synthetic construct
  REGION 1..11: note = short peptide
AEIVEGENHTY

SEQ ID NO: 554 - protein, 9 aa, synthetic construct
  REGION 1..9: note = short peptide
VQNLSKVAF

SEQ ID NO: 555 - protein, 15 aa, synthetic construct
  REGION 1..15: note = short peptide
MEIDDLASNMETVSK

SEQ ID NO: 556 - protein, 10 aa, synthetic construct
  REGION 1..10: note = short peptide
AETPGHTPSL

SEQ ID NO: 557 - protein, 8 aa, synthetic construct
  REGION 1..8: note = short peptide
APLVLQVD

SEQ ID NO: 558 - protein, 10 aa, synthetic construct
  REGION 1..10: note = short peptide
VEAKDCLNVL

SEQ ID NO: 559 - protein, 9 aa, synthetic construct
  REGION 1..9: note = short peptide
PSGSTKMYY

SEQ ID NO: 560 - protein, 13 aa, synthetic construct
  REGION 1..13: note = short peptide
PEYDEAGPSIVHR

SEQ ID NO: 561 - protein, 12 aa, synthetic construct
  REGION 1..12: note = short peptide
PGAGSSSVFSVL

SEQ ID NO: 562 - protein, 12 aa, synthetic construct
  REGION 1..12: note = short peptide
PGLARQAPKPRK

SEQ ID NO: 563 - protein, 9 aa, synthetic construct
  REGION 1..9: note = short peptide
KNSLDDSAK

SEQ ID NO: 564 - protein, 13 aa, synthetic construct
  REGION 1..13: note = short peptide
AALSTSSEPAAKP

SEQ ID NO: 565 - protein, 12 aa, synthetic construct
  REGION 1..12: note = short peptide
KMVGNVTGAQAY

SEQ ID NO: 566 - protein, 9 aa, synthetic construct
  REGION 1..9: note = short peptide
PGKNVVTTL

SEQ ID NO: 567 - protein, 10 aa, synthetic construct
  REGION 1..10: note = short peptide
PRGPPGPPGA

SEQ ID NO: 568 - protein, 12 aa, synthetic construct
  REGION 1..12: note = short peptide
KMVGDVTGAQAY

SEQ ID NO: 569 - protein, 11 aa, synthetic construct
  REGION 1..11: note = short peptide
PLNIDHLGEDK

SEQ ID NO: 570 - protein, 9 aa, synthetic construct
  REGION 1..9: note = short peptide
YYLNDLDRV

SEQ ID NO: 571 - protein, 12 aa, synthetic construct
  REGION 1..12: note = short peptide
TVILVLTLLMIC

SEQ ID NO: 572 - protein, 12 aa, synthetic construct
  REGION 1..12: note = short peptide
VHLTPEEKTAVN

SEQ ID NO: 573 - protein, 13 aa, synthetic construct
  REGION 1..13: note = short peptide
AARKSAPATGGVK

SEQ ID NO: 574 - protein, 9 aa, synthetic construct
  REGION 1..9: note = short peptide
VGLIRNLAL

SEQ ID NO: 575 - protein, 11 aa, synthetic construct
  REGION 1..11: note = short peptide
PLASDPLLSTM

SEQ ID NO: 576 - protein, 9 aa, synthetic construct
  REGION 1..9: note = short peptide
TYKNAAEMV

SEQ ID NO: 577 - protein, 9 aa, synthetic construct
  REGION 1..9: note = short peptide
ANVVRNISY

SEQ ID NO: 578 - protein, 9 aa, synthetic construct
  REGION 1..9: note = short peptide
REDKKLQCL

SEQ ID NO: 579 - protein, 10 aa, synthetic construct
  REGION 1..10: note = short peptide
REGMTKEECL

SEQ ID NO: 580 - protein, 9 aa, synthetic construct
  REGION 1..9: note = short peptide
SELVLPDCL

SEQ ID NO: 581 - protein, 9 aa, synthetic construct
  REGION 1..9: note = short peptide
SDLVRCLSV

SEQ ID NO: 582 - protein, 9 aa, synthetic construct
  REGION 1..9: note = short peptide
LAAFPTTCL

SEQ ID NO: 583 - protein, 11 aa, synthetic construct
  REGION 1..11: note = short peptide
RFLEEKGICNR

SEQ ID NO: 584 - protein, 9 aa, synthetic construct
  REGION 1..9: note = short peptide
SEDCTVMVW

SEQ ID NO: 585 - protein, 9 aa, synthetic construct
  REGION 1..9: note = short peptide
SADTCTHAY

SEQ ID NO: 586 - protein, 9 aa, synthetic construct
  REGION 1..9: note = short peptide
SAGKTQLAL

SEQ ID NO: 587 - protein, 10 aa, synthetic construct
  REGION 1..10: note = short peptide
KYLENQAFCF

SEQ ID NO: 588 - protein, 8 aa, synthetic construct
  REGION 1..8: note = short peptide
LNKLALQY

SEQ ID NO: 589 - protein, 8 aa, synthetic construct
  REGION 1..8: note = short peptide
SDSQTCPF

SEQ ID NO: 590 - protein, 11 aa, synthetic construct
  REGION 1..11: note = short peptide
AESDCNLAVAL

SEQ ID NO: 591 - protein, 9 aa, synthetic construct
  REGION 1..9: note = short peptide
MMFAVHCTW

SEQ ID NO: 592 - protein, 9 aa, synthetic construct
  REGION 1..9: note = short peptide
MMANGILKV

SEQ ID NO: 593 - protein, 15 aa, synthetic construct
  REGION 1..15: note = short peptide
MEINDLASNMETVSK

SEQ ID NO: 594 - protein, 10 aa, synthetic construct
  REGION 1..10: note = short peptide
NEITFCIQNY

SEQ ID NO: 595 - protein, 9 aa, synthetic construct
  REGION 1..9: note = short peptide
NPSKECEPY

SEQ ID NO: 596 - protein, 13 aa, synthetic construct
  REGION 1..13: note = short peptide
AELAVAPPGCSHL

SEQ ID NO: 597 - protein, 11 aa, synthetic construct
  REGION 1..11: note = short peptide
AEPNCADPATL

SEQ ID NO: 598 - protein, 12 aa, synthetic construct
  REGION 1..12: note = short peptide
MSLHHLTIPYFR

SEQ ID NO: 599 - protein, 10 aa, synthetic construct
  REGION 1..10: note = short peptide
AEIDICPANW

SEQ ID NO: 600 - protein, 10 aa, synthetic construct
  REGION 1..10: note = short peptide
SEVKLSSCDL

SEQ ID NO: 601 - protein, 8 aa, synthetic construct
  REGION 1..8: note = short peptide
YPYCDYEM

SEQ ID NO: 602 - protein, 9 aa, synthetic construct
  REGION 1..9: note = short peptide
ADYQRICKM

SEQ ID NO: 603 - protein, 9 aa, synthetic construct
  REGION 1..9: note = short peptide
RAFAFCNSF

SEQ ID NO: 604 - protein, 9 aa, synthetic construct
  REGION 1..9: note = short peptide
LYTDTICEI

SEQ ID NO: 605 - protein, 13 aa, synthetic construct
  REGION 1..13: note = short peptide
PVSPLLTCAGMAR

SEQ ID NO: 606 - protein, 9 aa, synthetic construct
  REGION 1..9: note = short peptide
LYCANGHTF

SEQ ID NO: 607 - protein, 10 aa, synthetic construct
  REGION 1..10: note = short peptide
QEIDFLQQLY

SEQ ID NO: 608 - protein, 15 aa, synthetic construct
  REGION 1..15: note = short peptide
LSTLEMDDRSHYTCE

SEQ ID NO: 609 - protein, 13 aa, synthetic construct
  REGION 1..13: note = short peptide
QEACENGRGAILL

SEQ ID NO: 610 - protein, 15 aa, synthetic construct
  REGION 1..15: note = short peptide
VNQIGSVTESIQACK

SEQ ID NO: 611 - protein, 8 aa, synthetic construct
  REGION 1..8: note = short peptide
AQACVLVF

SEQ ID NO: 612 - protein, 15 aa, synthetic construct
  REGION 1..15: note = short peptide
VNQIGSVTESLQACK

SEQ ID NO: 613 - protein, 12 aa, synthetic construct
  REGION 1..12: note = short peptide
EGVVECSFVKSQ

SEQ ID NO: 614 - protein, 9 aa, synthetic construct
  REGION 1..9: note = short peptide
HDSDRGCGF

SEQ ID NO: 615 - protein, 9 aa, synthetic construct
  REGION 1..9: note = short peptide
AQGLAGAQV

SEQ ID NO: 616 - protein, 12 aa, synthetic construct
  REGION 1..12: note = short peptide
VPDPLLSSQRRS

SEQ ID NO: 617 - protein, 9 aa, synthetic construct
  REGION 1..9: note = short peptide
APCNGNVAV

SEQ ID NO: 618 - protein, 9 aa, synthetic construct
  REGION 1..9: note = short peptide
IVIGCGTSY

SEQ ID NO: 619 - protein, 9 aa, synthetic construct
  REGION 1..9: note = short peptide
EEAMFHCQF

SEQ ID NO: 620 - protein, 9 aa, synthetic construct
  REGION 1..9: note = short peptide
IEDQICQGL

SEQ ID NO: 621 - protein, 9 aa, synthetic construct
  REGION 1..9: note = short peptide
IACHEEPVM

SEQ ID NO: 622 - protein, 10 aa, synthetic construct
  REGION 1..10: note = short peptide
HYNNVSCAVF

SEQ ID NO: 623 - protein, 9 aa, synthetic construct
  REGION 1..9: note = short peptide
DYSQYFKTI

SEQ ID NO: 624 - protein, 11 aa, synthetic construct
  REGION 1..11: note = short peptide
GELIIWDALDW

SEQ ID NO: 625 - protein, 13 aa, synthetic construct
  REGION 1..13: note = short peptide
VEEGIVLGGGCAL

SEQ ID NO: 626 - protein, 10 aa, synthetic construct
  REGION 1..10: note = short peptide
ASEDALCTVL

SEQ ID NO: 627 - protein, 8 aa, synthetic construct
  REGION 1..8: note = short peptide
FPDVVNCM

SEQ ID NO: 628 - protein, 9 aa, synthetic construct
  REGION 1..9: note = short peptide
VHFSANACL

SEQ ID NO: 629 - protein, 10 aa, synthetic construct
  REGION 1..10: note = short peptide
VEYFNCQQEL

SEQ ID NO: 630 - protein, 13 aa, synthetic construct
  REGION 1..13: note = short peptide
GCDVVVIPAGVPR

SEQ ID NO: 631 - protein, 11 aa, synthetic construct
  REGION 1..11: note = short peptide
VMFECDKGFYL

SEQ ID NO: 632 - protein, 9 aa, synthetic construct
  REGION 1..9: note = short peptide
ERFLFTCNL

SEQ ID NO: 633 - protein, 9 aa, synthetic construct
  REGION 1..9: note = short peptide
HACSSIIKM

SEQ ID NO: 634 - protein, 11 aa, synthetic construct
  REGION 1..11: note = short peptide
AVADFDECIRL

SEQ ID NO: 635 - protein, 8 aa, synthetic construct
  REGION 1..8: note = short peptide
GYSNGVIN

SEQ ID NO: 636 - protein, 10 aa, synthetic construct
  REGION 1..10: note = short peptide
TNAACAALDK

SEQ ID NO: 637 - protein, 9 aa, synthetic construct
  REGION 1..9: note = short peptide
TECRYALQL

SEQ ID NO: 638 - protein, 15 aa, synthetic construct
  REGION 1..15: note = short peptide
KNNLCPSGSNIISNL

SEQ ID NO: 639 - protein, 10 aa, synthetic construct
  REGION 1..10: note = short peptide
KLEDECSELK

SEQ ID NO: 640 - protein, 10 aa, synthetic construct
  REGION 1..10: note = short peptide
KIYNCELENV

SEQ ID NO: 641 - protein, 9 aa, synthetic construct
  REGION 1..9: note = short peptide
TGADCDPVY

SEQ ID NO: 642 - protein, 11 aa, synthetic construct
  REGION 1..11: note = short peptide
KLLEETGICVV

SEQ ID NO: 643 - protein, 9 aa, synthetic construct
  REGION 1..9: note = short peptide
CNGVLEGIR

SEQ ID NO: 644 - protein, 10 aa, synthetic construct
  REGION 1..10: note = short peptide
KTADGKCAYR

SEQ ID NO: 645 - protein, 8 aa, synthetic construct
  REGION 1..8: note = short peptide
ALGIVCTV

SEQ ID NO: 646 - protein, 9 aa, synthetic construct
  REGION 1..9: note = short peptide
ALKDFCTEW

SEQ ID NO: 647 - protein, 10 aa, synthetic construct
  REGION 1..10: note = short peptide
VYMGTGICGF

SEQ ID NO: 648 - protein, 9 aa, synthetic construct
  REGION 1..9: note = short peptide
KTMGFCYQI

SEQ ID NO: 649 - protein, 10 aa, synthetic construct
  REGION 1..10: note = short peptide
ALVDGKICTV

SEQ ID NO: 650 - protein, 8 aa, synthetic construct
  REGION 1..8: note = short peptide
KQMGYQCF

SEQ ID NO: 651 - protein, 10 aa, synthetic construct
  REGION 1..10: note = short peptide
KESEDCTLVL

SEQ ID NO: 652 - protein, 9 aa, synthetic construct
  REGION 1..9: note = short peptide
KENHCPTML

SEQ ID NO: 653 - protein, 9 aa, synthetic construct
  REGION 1..9: note = short peptide
ANACNSVIR

SEQ ID NO: 654 - protein, 9 aa, synthetic construct
  REGION 1..9: note = short peptide
AVSDICKTF

SEQ ID NO: 655 - protein, 9 aa, synthetic construct
  REGION 1..9: note = short peptide
VSVVDLTCR

SEQ ID NO: 656 - protein, 9 aa, synthetic construct
  REGION 1..9: note = short peptide
DRVTITNCL

SEQ ID NO: 657 - protein, 12 aa, synthetic construct
  REGION 1..12: note = short peptide
SEAPAKNGAGSL

SEQ ID NO: 658 - protein, 10 aa, synthetic construct
  REGION 1..10: note = short peptide
KTFDHYCEYR

SEQ ID NO: 659 - protein, 9 aa, synthetic construct
  REGION 1..9: note = short peptide
AVKTGSICW

SEQ ID NO: 660 - protein, 8 aa, synthetic construct
  REGION 1..8: note = short peptide
AAGPSCAL

SEQ ID NO: 661 - protein, 9 aa, synthetic construct
  REGION 1..9: note = short peptide
GVQGPPGPA

SEQ ID NO: 662 - protein, 14 aa, synthetic construct
  REGION 1..14: note = short peptide
GQDGRPGPPGPPGA

SEQ ID NO: 663 - protein, 10 aa, synthetic construct
  REGION 1..10: note = short peptide
CYAFNGTQRF

SEQ ID NO: 664 - protein, 11 aa, synthetic construct
  REGION 1..11: note = short peptide
GSKSQDPNPQY

SEQ ID NO: 665 - protein, 9 aa, synthetic construct
  REGION 1..9: note = short peptide
QSFYTPRSN

SEQ ID NO: 666 - protein, 15 aa, synthetic construct
  REGION 1..15: note = short peptide
QVQLVESGGGLVKPG

SEQ ID NO: 667 - protein, 10 aa, synthetic construct
  REGION 1..10: note = short peptide
RETPPNPAGL

SEQ ID NO: 668 - protein, 14 aa, synthetic construct
  REGION 1..14: note = short peptide
SLKLQASNVTNKND

SEQ ID NO: 669 - protein, 14 aa, synthetic construct
  REGION 1..14: note = short peptide
EAPYQNVTEFDGQD

SEQ ID NO: 670 - protein, 9 aa, synthetic construct
  REGION 1..9: note = short peptide
DGELLHGIL

SEQ ID NO: 671 - protein, 11 aa, synthetic construct
  REGION 1..11: note = short peptide
DELTLEGIKQF

SEQ ID NO: 672 - protein, 9 aa, synthetic construct
  REGION 1..9: note = short peptide
KQAIKSLNF

SEQ ID NO: 673 - protein, 8 aa, synthetic construct
  REGION 1..8: note = short peptide
GEHEVRVL

SEQ ID NO: 674 - protein, 9 aa, synthetic construct
  REGION 1..9: note = short peptide
GENDVIGCF

SEQ ID NO: 675 - protein, 14 aa, synthetic construct
  REGION 1..14: note = short peptide
VLSALQAGNKGTQA

SEQ ID NO: 676 - protein, 10 aa, synthetic construct
  REGION 1..10: note = short peptide
KLLEGEECRM

SEQ ID NO: 677 - protein, 8 aa, synthetic construct
  REGION 1..8: note = short peptide
APLVLQVD

SEQ ID NO: 678 - protein, 9 aa, synthetic construct
  REGION 1..9: note = short peptide
KNSLDDSAK

SEQ ID NO: 679 - protein, 12 aa, synthetic construct
  REGION 1..12: note = short peptide
KMVGNVTGAQAY

SEQ ID NO: 680 - protein, 10 aa, synthetic construct
  REGION 1..10: note = short peptide
KRQSLYENQV

SEQ ID NO: 681 - protein, 9 aa, synthetic construct
  REGION 1..9: note = short peptide
SRPGPSLQI

SEQ ID NO: 682 - protein, 15 aa, synthetic construct
  REGION 1..15: note = short peptide
KVHGSLARAGKVRGQ

SEQ ID NO: 683 - protein, 11 aa, synthetic construct
  REGION 1..11: note = short peptide
EEVNLNGSGKL

SEQ ID NO: 684 - protein, 9 aa, synthetic construct
  REGION 1..9: note = short peptide
YYLNDLDRV

SEQ ID NO: 685 - protein, 11 aa, synthetic construct
  REGION 1..11: note = short peptide
DLVEGGKYEFR

SEQ ID NO: 686 - protein, 15 aa, synthetic construct
  REGION 1..15: note = short peptide
DNIMVTFRNQASRPY

SEQ ID NO: 687 - protein, 10 aa, synthetic construct
  REGION 1..10: note = short peptide
DNAPVVSGSY

SEQ ID NO: 688 - protein, 9 aa, synthetic construct
  REGION 1..9: note = short peptide
EAGRVAGDL

SEQ ID NO: 689 - protein, 15 aa, synthetic construct
  REGION 1..15: note = short peptide
DTQFVQFDSDAASPR

SEQ ID NO: 690 - protein, 9 aa, synthetic construct
  REGION 1..9: note = short peptide
KTAKPKAAK

SEQ ID NO: 691 - protein, 9 aa, synthetic construct
  REGION 1..9: note = short peptide
STINYKWSF

SEQ ID NO: 692 - protein, 12 aa, synthetic construct
  REGION 1..12: note = short peptide
STAHARFATSTI

SEQ ID NO: 693 - protein, 12 aa, synthetic construct
  REGION 1..12: note = short peptide
DVPGFGGGPNNL

SEQ ID NO: 694 - protein, 15 aa, synthetic construct
  REGION 1..15: note = short peptide
AAQTKATFLKLAGPQ

SEQ ID NO: 695 - protein, 9 aa, synthetic construct
  REGION 1..9: note = short peptide
KSRPLVLTY

SEQ ID NO: 696 - protein, 8 aa, synthetic construct
  REGION 1..8: note = short peptide
YGMPRQIL

SEQ ID NO: 697 - protein, 9 aa, synthetic construct
  REGION 1..9: note = short peptide
KSNLIVHQR

SEQ ID NO: 698 - protein, 9 aa, synthetic construct
  REGION 1..9: note = short peptide
EEEKIVKKL

SEQ ID NO: 699 - protein, 10 aa, synthetic construct
  REGION 1..10: note = short peptide
KSSDIAKTFR

SEQ ID NO: 700 - protein, 12 aa, synthetic construct
  REGION 1..12: note = short peptide
EEAARHTYQALN

SEQ ID NO: 701 - protein, 13 aa, synthetic construct
  REGION 1..13: note = short peptide
ADKLTRIAIVNHD

SEQ ID NO: 702 - protein, 10 aa, synthetic construct
  REGION 1..10: note = short peptide
YSLQPPTDKD

SEQ ID NO: 703 - protein, 9 aa, synthetic construct
  REGION 1..9: note = short peptide
YKVEYPIMY

SEQ ID NO: 704 - protein, 8 aa, synthetic construct
  REGION 1..8: note = short peptide
TPLKAKII

SEQ ID NO: 705 - protein, 11 aa, synthetic construct
  REGION 1..11: note = short peptide
KTLPGGAGKGR

SEQ ID NO: 706 - protein, 11 aa, synthetic construct
  REGION 1..11: note = short peptide
KTLPGGAGKGR

SEQ ID NO: 707 - protein, 9 aa, synthetic construct
  REGION 1..9: note = short peptide
TPDPLSDSI

SEQ ID NO: 708 - protein, 9 aa, synthetic construct
  REGION 1..9: note = short peptide
ASQKGMSVY

SEQ ID NO: 709 - protein, 14 aa, synthetic construct
  REGION 1..14: note = short peptide
ATGEDASSPPPKTE

SEQ ID NO: 710 - protein, 9 aa, synthetic construct
  REGION 1..9: note = short peptide
ANVVRNISY

SEQ ID NO: 711 - protein, 9 aa, synthetic construct
  REGION 1..9: note = short peptide
KTSNIRANF

SEQ ID NO: 712 - protein, 15 aa, synthetic construct
  REGION 1..15: note = short peptide
APSSDGKVSPGTLSI

SEQ ID NO: 713 - protein, 11 aa, synthetic construct
  REGION 1..11: note = short peptide
TVKLQSEVDKY

SEQ ID NO: 714 - protein, 9 aa, synthetic construct
  REGION 1..9: note = short peptide
AQYLINARL

SEQ ID NO: 715 - protein, 9 aa, synthetic construct
  REGION 1..9: note = short peptide
TRFNKTKTF

SEQ ID NO: 716 - protein, 11 aa, synthetic construct
  REGION 1..11: note = short peptide
ARVPGPPARLG

SEQ ID NO: 717 - protein, 10 aa, synthetic construct
  REGION 1..10: note = short peptide
APQTQHVSPM

SEQ ID NO: 718 - protein, 9 aa, synthetic construct
  REGION 1..9: note = short peptide
DETLSTLRY

SEQ ID NO: 719 - protein, 11 aa, synthetic construct
  REGION 1..11: note = short peptide
TEPAPEPAPEP

SEQ ID NO: 720 - protein, 13 aa, synthetic construct
  REGION 1..13: note = short peptide
DGEGGAYTDGEGY

SEQ ID NO: 721 - protein, 11 aa, synthetic construct
  REGION 1..11: note = short peptide
VYCGKKAQLNI

SEQ ID NO: 722 - protein, 9 aa, synthetic construct
  REGION 1..9: note = short peptide
TDEPMGITL

SEQ ID NO: 723 - protein, 11 aa, synthetic construct
  REGION 1..11: note = short peptide
DGRPGPPGPPG

SEQ ID NO: 724 - protein, 10 aa, synthetic construct
  REGION 1..10: note = short peptide
KSLFPENLQA

SEQ ID NO: 725 - protein, 9 aa, synthetic construct
  REGION 1..9: note = short peptide
DIKALETEL

SEQ ID NO: 726 - protein, 9 aa, synthetic construct
  REGION 1..9: note = short peptide
TIKSKGIAV

SEQ ID NO: 727 - protein, 9 aa, synthetic construct
  REGION 1..9: note = short peptide
ATYMKPEMW

SEQ ID NO: 728 - protein, 9 aa, synthetic construct
  REGION 1..9: note = short peptide
ATYMKPEMW

SEQ ID NO: 729 - protein, 8 aa, synthetic construct
  REGION 1..8: note = short peptide
TLDSKVVY

SEQ ID NO: 730 - protein, 9 aa, synthetic construct
  REGION 1..9: note = short peptide
TKPLKVQVM

SEQ ID NO: 731 - protein, 10 aa, synthetic construct
  REGION 1..10: note = short peptide
DAAEDYAEGV

SEQ ID NO: 732 - protein, 14 aa, synthetic construct
  REGION 1..14: note = short peptide
VNVVPTFGKKKGPN

SEQ ID NO: 733 - protein, 15 aa, synthetic construct
  REGION 1..15: note = short peptide
SDRYVSHFETEGPHV

SEQ ID NO: 734 - protein, 8 aa, synthetic construct
  REGION 1..8: note = short peptide
KAKDLHLS

SEQ ID NO: 735 - protein, 15 aa, synthetic construct
  REGION 1..15: note = short peptide
LEKELHPVLKNPDDP

SEQ ID NO: 736 - protein, 9 aa, synthetic construct
  REGION 1..9: note = short peptide
KETPDKVEL

SEQ ID NO: 737 - protein, 9 aa, synthetic construct
  REGION 1..9: note = short peptide
NRPGNNFLM

SEQ ID NO: 738 - protein, 15 aa, synthetic construct
  REGION 1..15: note = short peptide
NPGGYVAYSKAATVT

SEQ ID NO: 739 - protein, 10 aa, synthetic construct
  REGION 1..10: note = short peptide
KASSPGHPAF

SEQ ID NO: 740 - protein, 10 aa, synthetic construct
  REGION 1..10: note = short peptide
KARHAKHHGK

SEQ ID NO: 741 - protein, 9 aa, synthetic construct
  REGION 1..9: note = short peptide
KAMKALESI

SEQ ID NO: 742 - protein, 9 aa, synthetic construct
  REGION 1..9: note = short peptide
NRHGLIRKY

SEQ ID NO: 743 - protein, 15 aa, synthetic construct
  REGION 1..15: note = short peptide
KAAKPKAAKPKAAKP

SEQ ID NO: 744 - protein, 15 aa, synthetic construct
  REGION 1..15: note = short peptide
LDTVKGSSLHVGSDL

SEQ ID NO: 745 - protein, 10 aa, synthetic construct
  REGION 1..10: note = short peptide
PEVKFNWYVD

SEQ ID NO: 746 - protein, 10 aa, synthetic construct
  REGION 1..10: note = short peptide
PEVQFNWYVD

SEQ ID NO: 747 - protein, 10 aa, synthetic construct
  REGION 1..10: note = short peptide
KASSPGHPAF

SEQ ID NO: 748 - protein, 10 aa, synthetic construct
  REGION 1..10: note = short peptide
KELNPSLNFK

SEQ ID NO: 749 - protein, 12 aa, synthetic construct
  REGION 1..12: note = short peptide
KEMNPALGIDCL

SEQ ID NO: 750 - protein, 9 aa, synthetic construct
  REGION 1..9: note = short peptide
KEMLPHVGV

SEQ ID NO: 751 - protein, 13 aa, synthetic construct
  REGION 1..13: note = short peptide
KEKFEKDKSEKED

SEQ ID NO: 752 - protein, 13 aa, synthetic construct
  REGION 1..13: note = short peptide
NLEIVDKQGHTKV

SEQ ID NO: 753 - protein, 12 aa, synthetic construct
  REGION 1..12: note = short peptide
NEVALGPAGPPG

SEQ ID NO: 754 - protein, 13 aa, synthetic construct
  REGION 1..13: note = short peptide
KDIYQKSTVLKDD

SEQ ID NO: 755 - protein, 13 aa, synthetic construct
  REGION 1..13: note = short peptide
PGLARQAPKPRKQ

SEQ ID NO: 756 - protein, 10 aa, synthetic construct
  REGION 1..10: note = short peptide
PGPPAQFQRP

SEQ ID NO: 757 - protein, 12 aa, synthetic construct
  REGION 1..12: note = short peptide
HTDSLFPILLQT

SEQ ID NO: 758 - protein, 11 aa, synthetic construct
  REGION 1..11: note = short peptide
IAYQKKKLCFK

SEQ ID NO: 759 - protein, 9 aa, synthetic construct
  REGION 1..9: note = short peptide
IADKPMTQY

SEQ ID NO: 760 - protein, 9 aa, synthetic construct
  REGION 1..9: note = short peptide
HYLPDLHHL

SEQ ID NO: 761 - protein, 15 aa, synthetic construct
  REGION 1..15: note = short peptide
QTEAAPAHVSEGLPL

SEQ ID NO: 762 - protein, 8 aa, synthetic construct
  REGION 1..8: note = short peptide
LAMKGLTL

SEQ ID NO: 763 - protein, 8 aa, synthetic construct
  REGION 1..8: note = short peptide
PRHLHVVH

SEQ ID NO: 764 - protein, 9 aa, synthetic construct
  REGION 1..9: note = short peptide
PSLELPKPV

SEQ ID NO: 765 - protein, 13 aa, synthetic construct
  REGION 1..13: note = short peptide
PNMVTPGHACTQK

SEQ ID NO: 766 - protein, 15 aa, synthetic construct
  REGION 1..15: note = short peptide
PGVLDRMMKKLDTNS

SEQ ID NO: 767 - protein, 8 aa, synthetic construct
  REGION 1..8: note = short peptide
IRRFFPKR

SEQ ID NO: 768 - protein, 11 aa, synthetic construct
  REGION 1..11: note = short peptide
IEGAGILLTRF

SEQ ID NO: 769 - protein, 14 aa, synthetic construct
  REGION 1..14: note = short peptide
PTANQWDYKNIIEK

SEQ ID NO: 770 - protein, 15 aa, synthetic construct
  REGION 1..15: note = short peptide
QAEEAEEQSNVNLSK

SEQ ID NO: 771 - protein, 8 aa, synthetic construct
  REGION 1..8: note = short peptide
QAIQNYMK

SEQ ID NO: 772 - protein, 9 aa, synthetic construct
  REGION 1..9: note = short peptide
PYMSSPCHI

SEQ ID NO: 773 - protein, 13 aa, synthetic construct
  REGION 1..13: note = short peptide
IIYGGSVTGATCK

SEQ ID NO: 774 - protein, 10 aa, synthetic construct
  REGION 1..10: note = short peptide
KEVAGPHLER

SEQ ID NO: 775 - protein, 10 aa, synthetic construct
  REGION 1..10: note = short peptide
KLMSDKRTCV

SEQ ID NO: 776 - protein, 10 aa, synthetic construct
  REGION 1..10: note = short peptide
LVFDNKHTNY

SEQ ID NO: 777 - protein, 9 aa, synthetic construct
  REGION 1..9: note = short peptide
KLHDETLTY

SEQ ID NO: 778 - protein, 15 aa, synthetic construct
  REGION 1..15: note = short peptide
MEEETHTDAKIRAEN

SEQ ID NO: 779 - protein, 14 aa, synthetic construct
  REGION 1..14: note = short peptide
MEEKYLPELMAEKD

SEQ ID NO: 780 - protein, 8 aa, synthetic construct
  REGION 1..8: note = short peptide
KLEKEKIL

SEQ ID NO: 781 - protein, 9 aa, synthetic construct
  REGION 1..9: note = short peptide
KMVEDLISV

SEQ ID NO: 782 - protein, 11 aa, synthetic construct
  REGION 1..11: note = short peptide
LNALAGLDPDE

SEQ ID NO: 783 - protein, 8 aa, synthetic construct
  REGION 1..8: note = short peptide
LLGSIIFR

SEQ ID NO: 784 - protein, 9 aa, synthetic construct
  REGION 1..9: note = short peptide
LSDPIVNTL

SEQ ID NO: 785 - protein, 10 aa, synthetic construct
  REGION 1..10: note = short peptide
LQNVDMKIGV

SEQ ID NO: 786 - protein, 11 aa, synthetic construct
  REGION 1..11: note = short peptide
KMKEALLSIGK

SEQ ID NO: 787 - protein, 9 aa, synthetic construct
  REGION 1..9: note = short peptide
KPDPKLYTR

SEQ ID NO: 788 - protein, 10 aa, synthetic construct
  REGION 1..10: note = short peptide
KGPGGKRGHK

SEQ ID NO: 789 - protein, 8 aa, synthetic construct
  REGION 1..8: note = short peptide
KHKEFQKT

SEQ ID NO: 790 - protein, 9 aa, synthetic construct
  REGION 1..9: note = short peptide
LGSGLAVLR

SEQ ID NO: 791 - protein, 9 aa, synthetic construct
  REGION 1..9: note = short peptide
KPAHIAKVK

SEQ ID NO: 792 - protein, 9 aa, synthetic construct
  REGION 1..9: note = short peptide
KITRPGAKL

SEQ ID NO: 793 - protein, 9 aa, synthetic construct
  REGION 1..9: note = short peptide
KKEGKIYRL

SEQ ID NO: 794 - protein, 12 aa, synthetic construct
  REGION 1..12: note = short peptide
KKKKQVLKFTLD

SEQ ID NO: 795 - protein, 9 aa, synthetic construct
  REGION 1..9: note = short peptide
KKFQIPVSF

SEQ ID NO: 796 - protein, 10 aa, synthetic construct
  REGION 1..10: note = short peptide
KIGAVVGGVL

SEQ ID NO: 797 - protein, 10 aa, synthetic construct
  REGION 1..10: note = short peptide
MPHEDCITAL

SEQ ID NO: 798 - protein, 8 aa, synthetic construct
  REGION 1..8: note = short peptide
KHWVYVKR

SEQ ID NO: 799 - protein, 14 aa, synthetic construct
  REGION 1..14: note = short peptide
SGPAGPRGPPGSAG

SEQ ID NO: 800 - protein, 15 aa, synthetic construct
  REGION 1..15: note = short peptide
FPPTEAQSTAAEAPL

SEQ ID NO: 801 - protein, 9 aa, synthetic construct
  REGION 1..9: note = short peptide
KWEAEPVYV

SEQ ID NO: 802 - protein, 9 aa, synthetic construct
  REGION 1..9: note = short peptide
KWEAEPVYV

SEQ ID NO: 803 - protein, 15 aa, synthetic construct
  REGION 1..15: note = short peptide
FNWKKSSSGSLLKMG

SEQ ID NO: 804 - protein, 15 aa, synthetic construct
  REGION 1..15: note = short peptide
FNAHGDANTIVCNSK

SEQ ID NO: 805 - protein, 9 aa, synthetic construct
  REGION 1..9: note = short peptide
FMTRNSSTI

SEQ ID NO: 806 - protein, 9 aa, synthetic construct
  REGION 1..9: note = short peptide
FLQLHSQIF

SEQ ID NO: 807 - protein, 9 aa, synthetic construct
  REGION 1..9: note = short peptide
FPDKPITQY

SEQ ID NO: 808 - protein, 12 aa, synthetic construct
  REGION 1..12: note = short peptide
GFPGTPGLPGFK

SEQ ID NO: 809 - protein, 14 aa, synthetic construct
  REGION 1..14: note = short peptide
GFPGLPGPSGEPGK

SEQ ID NO: 810 - protein, 14 aa, synthetic construct
  REGION 1..14: note = short peptide
GEVGPRGLPGEPGP

SEQ ID NO: 811 - protein, 13 aa, synthetic construct
  REGION 1..13: note = short peptide
GDDVDKDLAGQDA

SEQ ID NO: 812 - protein, 13 aa, synthetic construct
  REGION 1..13: note = short peptide
SEKKQPVDLGLLE

SEQ ID NO: 813 - protein, 15 aa, synthetic construct
  REGION 1..15: note = short peptide
GAPGAPGAKDARMRA

SEQ ID NO: 814 - protein, 9 aa, synthetic construct
  REGION 1..9: note = short peptide
KQFRGLQSR

SEQ ID NO: 815 - protein, 14 aa, synthetic construct
  REGION 1..14: note = short peptide
SDSATQDNSFNKNS

SEQ ID NO: 816 - protein, 12 aa, synthetic construct
  REGION 1..12: note = short peptide
ELTLGTDPAQPL

SEQ ID NO: 817 - protein, 9 aa, synthetic construct
  REGION 1..9: note = short peptide
KVMNWKETL

SEQ ID NO: 818 - protein, 10 aa, synthetic construct
  REGION 1..10: note = short peptide
EGPLPPPPPA

SEQ ID NO: 819 - protein, 12 aa, synthetic construct
  REGION 1..12: note = short peptide
EGNGTVMGAELR

SEQ ID NO: 820 - protein, 9 aa, synthetic construct
  REGION 1..9: note = short peptide
EGLDIRVKI

SEQ ID NO: 821 - protein, 10 aa, synthetic construct
  REGION 1..10: note = short peptide
SQLQPPMPKP

SEQ ID NO: 822 - protein, 9 aa, synthetic construct
  REGION 1..9: note = short peptide
SPTNGNPLL

SEQ ID NO: 823 - protein, 10 aa, synthetic construct
  REGION 1..10: note = short peptide
ELANVLPISY

SEQ ID NO: 824 - protein, 9 aa, synthetic construct
  REGION 1..9: note = short peptide
SPSPAGSSI

SEQ ID NO: 825 - protein, 13 aa, synthetic construct
  REGION 1..13: note = short peptide
SKNQVVLTMTNMD

SEQ ID NO: 826 - protein, 14 aa, synthetic construct
  REGION 1..14: note = short peptide
KVVSETNDTKVLRH

SEQ ID NO: 827 - protein, 9 aa, synthetic construct
  REGION 1..9: note = short peptide
KQTAETILT

SEQ ID NO: 828 - protein, 10 aa, synthetic construct
  REGION 1..10: note = short peptide
EVLKAVAGTY

SEQ ID NO: 829 - protein, 9 aa, synthetic construct
  REGION 1..9: note = short peptide
RMKTGNKIR

SEQ ID NO: 830 - protein, 11 aa, synthetic construct
  REGION 1..11: note = short peptide
HAIQENKKDLY

SEQ ID NO: 831 - protein, 10 aa, synthetic construct
  REGION 1..10: note = short peptide
HPDAPMSQVY

SEQ ID NO: 832 - protein, 15 aa, synthetic construct
  REGION 1..15: note = short peptide
REGLKGVWKWMITKK

SEQ ID NO: 833 - protein, 12 aa, synthetic construct
  REGION 1..12: note = short peptide
RENKHFAAASGK

SEQ ID NO: 834 - protein, 9 aa, synthetic construct
  REGION 1..9: note = short peptide
KYTPPPHHI

SEQ ID NO: 835 - protein, 11 aa, synthetic construct
  REGION 1..11: note = short peptide
GPPGPAGSRGD

SEQ ID NO: 836 - protein, 11 aa, synthetic construct
  REGION 1..11: note = short peptide
GPPGADGQPGA

SEQ ID NO: 837 - protein, 11 aa, synthetic construct
  REGION 1..11: note = short peptide
KYFNSYTLTGR

SEQ ID NO: 838 - protein, 15 aa, synthetic construct
  REGION 1..15: note = short peptide
GLPGVAGAPGLPGPR

SEQ ID NO: 839 - protein, 11 aa, synthetic construct
  REGION 1..11: note = short peptide
KYISPETMVAL

SEQ ID NO: 840 - protein, 9 aa, synthetic construct
  REGION 1..9: note = short peptide
RQSSATSSF

SEQ ID NO: 841 - protein, 11 aa, synthetic construct
  REGION 1..11: note = short peptide
RQYAKDIGFIK

SEQ ID NO: 842 - protein, 8 aa, synthetic construct
  REGION 1..8: note = short peptide
RRDHHIQR

SEQ ID NO: 843 - protein, 11 aa, synthetic construct
  REGION 1..11: note = short peptide
GSRGGPGGGFR

SEQ ID NO: 844 - protein, 15 aa, synthetic construct
  REGION 1..15: note = short peptide
GSPVKAGVETTKPSK

SEQ ID NO: 845 - protein, 10 aa, synthetic construct
  REGION 1..10: note = short peptide
RQLEDILSTY

SEQ ID NO: 846 - protein, 9 aa, synthetic construct
  REGION 1..9: note = short peptide
RQADKVWRL

SEQ ID NO: 847 - protein, 13 aa, synthetic construct
  REGION 1..13: note = short peptide
RQKDVKDGKYSQV

SEQ ID NO: 848 - protein, 9 aa, synthetic construct
  REGION 1..9: note = short peptide
RQHEEPESF

SEQ ID NO: 849 - protein, 9 aa, synthetic construct
  REGION 1..9: note = short peptide
RSNLIAHNR

SEQ ID NO: 850 - protein, 11 aa, synthetic construct
  REGION 1..11: note = short peptide
VQQIQSVCMEC

SEQ ID NO: 851 - protein, 9 aa, synthetic construct
  REGION 1..9: note = short peptide
RYLSCVPTR

SEQ ID NO: 852 - protein, 9 aa, synthetic construct
  REGION 1..9: note = short peptide
VNLSSCVAL

SEQ ID NO: 853 - protein, 9 aa, synthetic construct
  REGION 1..9: note = short peptide
SEIFNNPCF

SEQ ID NO: 854 - protein, 9 aa, synthetic construct
  REGION 1..9: note = short peptide
VMLEDNVCL

SEQ ID NO: 855 - protein, 9 aa, synthetic construct
  REGION 1..9: note = short peptide
SENNACINF

SEQ ID NO: 856 - protein, 9 aa, synthetic construct
  REGION 1..9: note = short peptide
SEPIHCIVW

SEQ ID NO: 857 - protein, 8 aa, synthetic construct
  REGION 1..8: note = short peptide
YQEVSQCF

SEQ ID NO: 858 - protein, 10 aa, synthetic construct
  REGION 1..10: note = short peptide
SQSLLHSDGY

SEQ ID NO: 859 - protein, 9 aa, synthetic construct
  REGION 1..9: note = short peptide
SQKALHCTF

SEQ ID NO: 860 - protein, 9 aa, synthetic construct
  REGION 1..9: note = short peptide
SYLCNVTLF

SEQ ID NO: 861 - protein, 9 aa, synthetic construct
  REGION 1..9: note = short peptide
TFICDHPQI

SEQ ID NO: 862 - protein, 11 aa, synthetic construct
  REGION 1..11: note = short peptide
TEIQQVNSNCL

SEQ ID NO: 863 - protein, 10 aa, synthetic construct
  REGION 1..10: note = short peptide
TEADNTGCHL

SEQ ID NO: 864 - protein, 9 aa, synthetic construct
  REGION 1..9: note = short peptide
SITDSCAVY

SEQ ID NO: 865 - protein, 9 aa, synthetic construct
  REGION 1..9: note = short peptide
VCNSRILSY

SEQ ID NO: 866 - protein, 9 aa, synthetic construct
  REGION 1..9: note = short peptide
SMCGLMLKL

SEQ ID NO: 867 - protein, 10 aa, synthetic construct
  REGION 1..10: note = short peptide
HESEVFICAW

SEQ ID NO: 868 - protein, 9 aa, synthetic construct
  REGION 1..9: note = short peptide
HEILCKLSL

SEQ ID NO: 869 - protein, 10 aa, synthetic construct
  REGION 1..10: note = short peptide
FPCQYVKDTY

SEQ ID NO: 870 - protein, 9 aa, synthetic construct
  REGION 1..9: note = short peptide
FPACPQRSY

SEQ ID NO: 871 - protein, 9 aa, synthetic construct
  REGION 1..9: note = short peptide
GGHTSVVCY

SEQ ID NO: 872 - protein, 9 aa, synthetic construct
  REGION 1..9: note = short peptide
IVAGVFVCL

SEQ ID NO: 873 - protein, 11 aa, synthetic construct
  REGION 1..11: note = short peptide
KDNEVLLQIDK

SEQ ID NO: 874 - protein, 9 aa, synthetic construct
  REGION 1..9: note = short peptide
KEAAVIICI

SEQ ID NO: 875 - protein, 10 aa, synthetic construct
  REGION 1..10: note = short peptide
KEAELQCTQL

SEQ ID NO: 876 - protein, 11 aa, synthetic construct
  REGION 1..11: note = short peptide
KEDEPGRCDVL

SEQ ID NO: 877 - protein, 8 aa, synthetic construct
  REGION 1..8: note = short peptide
HQVMKEAF

SEQ ID NO: 878 - protein, 10 aa, synthetic construct
  REGION 1..10: note = short peptide
HSRVPPILHR

SEQ ID NO: 879 - protein, 9 aa, synthetic construct
  REGION 1..9: note = short peptide
AVMPHFVCL

SEQ ID NO: 880 - protein, 8 aa, synthetic construct
  REGION 1..8: note = short peptide
AQMKVCSL

SEQ ID NO: 881 - protein, 8 aa, synthetic construct
  REGION 1..8: note = short peptide
CQVEHPSL

SEQ ID NO: 882 - protein, 10 aa, synthetic construct
  REGION 1..10: note = short peptide
CEAPDANQQL

SEQ ID NO: 883 - protein, 8 aa, synthetic construct
  REGION 1..8: note = short peptide
CDSPHQNL

SEQ ID NO: 884 - protein, 11 aa, synthetic construct
  REGION 1..11: note = short peptide
CEGISMGDHLW

SEQ ID NO: 885 - protein, 15 aa, synthetic construct
  REGION 1..15: note = short peptide
CGKIEVEKPFAIAKE

SEQ ID NO: 886 - protein, 10 aa, synthetic construct
  REGION 1..10: note = short peptide
AELGVEACRL

SEQ ID NO: 887 - protein, 9 aa, synthetic construct
  REGION 1..9: note = short peptide
AELNYGLCL

SEQ ID NO: 888 - protein, 8 aa, synthetic construct
  REGION 1..8: note = short peptide
EMPCHHLF

SEQ ID NO: 889 - protein, 9 aa, synthetic construct
  REGION 1..9: note = short peptide
ELMGICSSY

SEQ ID NO: 890 - protein, 11 aa, synthetic construct
  REGION 1..11: note = short peptide
EENFPDGKVCW

SEQ ID NO: 891 - protein, 9 aa, synthetic construct
  REGION 1..9: note = short peptide
EEPCSKASW

SEQ ID NO: 892 - protein, 13 aa, synthetic construct
  REGION 1..13: note = short peptide
FAYPGCDAGIRAM

SEQ ID NO: 893 - protein, 14 aa, synthetic construct
  REGION 1..14: note = short peptide
ETVSEESNVLCLSK

SEQ ID NO: 894 - protein, 9 aa, synthetic construct
  REGION 1..9: note = short peptide
EAAVPSVCF

SEQ ID NO: 895 - protein, 10 aa, synthetic construct
  REGION 1..10: note = short peptide
EAIQQKIEYK

SEQ ID NO: 896 - protein, 14 aa, synthetic construct
  REGION 1..14: note = short peptide
DQGAPGSVGPAGPR

SEQ ID NO: 897 - protein, 8 aa, synthetic construct
  REGION 1..8: note = short peptide
DRHCVSVL

SEQ ID NO: 898 - protein, 9 aa, synthetic construct
  REGION 1..9: note = short peptide
PYCSKPITL

SEQ ID NO: 899 - protein, 11 aa, synthetic construct
  REGION 1..11: note = short peptide
QDCAVLQQSSL

SEQ ID NO: 900 - protein, 9 aa, synthetic construct
  REGION 1..9: note = short peptide
NYVDCMKKF

SEQ ID NO: 901 - protein, 8 aa, synthetic construct
  REGION 1..8: note = short peptide
MSLTACKV

SEQ ID NO: 902 - protein, 10 aa, synthetic construct
  REGION 1..10: note = short peptide
QFSSTPLAGL

SEQ ID NO: 903 - protein, 8 aa, synthetic construct
  REGION 1..8: note = short peptide
RLNVIRKL

SEQ ID NO: 904 - protein, 11 aa, synthetic construct
  REGION 1..11: note = short peptide
RTFCDSSSLLF

SEQ ID NO: 905 - protein, 13 aa, synthetic construct
  REGION 1..13: note = short peptide
QVQLVESGGGLVK

SEQ ID NO: 906 - protein, 15 aa, synthetic construct
  REGION 1..15: note = short peptide
QVQLVESGGGLVKPG

SEQ ID NO: 907 - protein, 10 aa, synthetic construct
  REGION 1..10: note = short peptide
RELDLSNNCL

SEQ ID NO: 908 - protein, 10 aa, synthetic construct
  REGION 1..10: note = short peptide
RELEIGQDCL

SEQ ID NO: 909 - protein, 8 aa, synthetic construct
  REGION 1..8: note = short peptide
KQWHVSCF

SEQ ID NO: 910 - protein, 11 aa, synthetic construct
  REGION 1..11: note = short peptide
KIEISGTCLSF

SEQ ID NO: 911 - protein, 10 aa, synthetic construct
  REGION 1..10: note = short peptide
KKLLQLKNFN

SEQ ID NO: 912 - protein, 11 aa, synthetic construct
  REGION 1..11: note = short peptide
LQTAYGKELPG

SEQ ID NO: 913 - protein, 9 aa, synthetic construct
  REGION 1..9: note = short peptide
KYARVPCGF

SEQ ID NO: 914 - protein, 11 aa, synthetic construct
  REGION 1..11: note = short peptide
KYICPDKINSI

SEQ ID NO: 915 - protein, 9 aa, synthetic construct
  REGION 1..9: note = short peptide
KTYPCKISY

SEQ ID NO: 916 - protein, 9 aa, synthetic construct
  REGION 1..9: note = short peptide
SSQTTIWSR

SEQ ID NO: 917 - protein, 8 aa, synthetic construct
  REGION 1..8: note = short peptide
AQIVIIEH

SEQ ID NO: 918 - protein, 14 aa, synthetic construct
  REGION 1..14: note = short peptide
LQDAEEHVEAVNSK

SEQ ID NO: 919 - protein, 9 aa, synthetic construct
  REGION 1..9: note = short peptide
SAAGKDWAF

SEQ ID NO: 920 - protein, 10 aa, synthetic construct
  REGION 1..10: note = short peptide
RYRGIGDCVR

SEQ ID NO: 921 - protein, 15 aa, synthetic construct
  REGION 1..15: note = short peptide
DNIMVTFRNQASRPY

SEQ ID NO: 922 - protein, 10 aa, synthetic construct
  REGION 1..10: note = short peptide
DNAPVVSGSY

SEQ ID NO: 923 - protein, 9 aa, synthetic construct
  REGION 1..9: note = short peptide
TKPLKVQVM

SEQ ID NO: 924 - protein, 15 aa, synthetic construct
  REGION 1..15: note = short peptide
LEKELHPVLKNPDDP

SEQ ID NO: 925 - protein, 12 aa, synthetic construct
  REGION 1..12: note = short peptide
KEMNPALGIDCL

SEQ ID NO: 926 - protein, 15 aa, synthetic construct
  REGION 1..15: note = short peptide
QTEAAPAHVSEGLPL

SEQ ID NO: 927 - protein, 15 aa, synthetic construct
  REGION 1..15: note = short peptide
PGVLDRMMKKLDTNS

SEQ ID NO: 928 - protein, 14 aa, synthetic construct
  REGION 1..14: note = short peptide
PTANQWDYKNIIEK

SEQ ID NO: 929 - protein, 15 aa, synthetic construct
  REGION 1..15: note = short peptide
QAEEAEEQSNVNLSK

SEQ ID NO: 930 - protein, 8 aa, synthetic construct
  REGION 1..8: note = short peptide
QAIQNYMK

SEQ ID NO: 931 - protein, 9 aa, synthetic construct
  REGION 1..9: note = short peptide
PYMSSPCHI

SEQ ID NO: 932 - protein, 10 aa, synthetic construct
  REGION 1..10: note = short peptide
MPHEDCITAL

SEQ ID NO: 933 - protein, 9 aa, synthetic construct
  REGION 1..9: note = short peptide
KWEAEPVYV

SEQ ID NO: 934 - protein, 15 aa, synthetic construct
  REGION 1..15: note = short peptide
FNAHGDANTIVCNSK

SEQ ID NO: 935 - protein, 13 aa, synthetic construct
  REGION 1..13: note = short peptide
GDDVDKDLAGQDA

SEQ ID NO: 936 - protein, 12 aa, synthetic construct
  REGION 1..12: note = short peptide
ELTLGTDPAQPL

SEQ ID NO: 937 - protein, 10 aa, synthetic construct
  REGION 1..10: note = short peptide
SQLQPPMPKP

SEQ ID NO: 938 - protein, 10 aa, synthetic construct
  REGION 1..10: note = short peptide
ELANVLPISY

SEQ ID NO: 939 - protein, 14 aa, synthetic construct
  REGION 1..14: note = short peptide
KVVSETNDTKVLRH

SEQ ID NO: 940 - protein, 15 aa, synthetic construct
  REGION 1..15: note = short peptide
REGLKGVWKWMITKK

SEQ ID NO: 941 - protein, 11 aa, synthetic construct
  REGION 1..11: note = short peptide
GPPGADGQPGA

SEQ ID NO: 942 - protein, 11 aa, synthetic construct
  REGION 1..11: note = short peptide
TEIQQVNSNCL

SEQ ID NO: 943 - protein, 11 aa, synthetic construct
  REGION 1..11: note = short peptide
TEIQQVNSNCL

SEQ ID NO: 944 - protein, 10 aa, synthetic construct
  REGION 1..10: note = short peptide
TMASPGKDNY

SEQ ID NO: 945 - protein, 9 aa, synthetic construct
  REGION 1..9: note = short peptide
EECHHGRTP

SEQ ID NO: 946 - protein, 8 aa, synthetic construct
  REGION 1..8: note = short peptide
QANQHLAN

SEQ ID NO: 947 - protein, 9 aa, synthetic construct
  REGION 1..9: note = short peptide
KLNAGEQRL

SEQ ID NO: 948 - protein, 9 aa, synthetic construct
  REGION 1..9: note = short peptide
AECEKSFNC

SEQ ID NO: 949 - protein, 8 aa, synthetic construct
  REGION 1..8: note = short peptide
QANQHLAN

SEQ ID NO: 950 - protein, 9 aa, synthetic construct
  REGION 1..9: note = short peptide
FSDHHENKY

SEQ ID NO: 951 - protein, 9 aa, synthetic construct
  REGION 1..9: note = short peptide
AESPGVPVA

SEQ ID NO: 952 - protein, 11 aa, synthetic construct
  REGION 1..11: note = short peptide
AECAGDAVSVA

SEQ ID NO: 953 - protein, 10 aa, synthetic construct
  REGION 1..10: note = short peptide
AEQAGCMVSA

SEQ ID NO: 954 - protein, 14 aa, synthetic construct
  REGION 1..14: note = short peptide
SSKTASTNNIAQAR

SEQ ID NO: 955 - protein, 9 aa, synthetic construct
  REGION 1..9: note = short peptide
KEQEPQKSK

SEQ ID NO: 956 - protein, 10 aa, synthetic construct
  REGION 1..10: note = short peptide
ATEDPWKTNY

SEQ ID NO: 957 - protein, 10 aa, synthetic construct
  REGION 1..10: note = short peptide
HTDCPGHADY

SEQ ID NO: 958 - protein, 9 aa, synthetic construct
  REGION 1..9: note = short peptide
NSELSCQLY

SEQ ID NO: 959 - protein, 11 aa, synthetic construct
  REGION 1..11: note = short peptide
AEKNASSPEKA

SEQ ID NO: 960 - protein, 9 aa, synthetic construct
  REGION 1..9: note = short peptide
AECAGPPVP

SEQ ID NO: 961 - protein, 8 aa, synthetic construct
  REGION 1..8: note = short peptide
EAANSPQV

SEQ ID NO: 962 - protein, 10 aa, synthetic construct
  REGION 1..10: note = short peptide
EGGAPQPPPP

SEQ ID NO: 963 - protein, 9 aa, synthetic construct
  REGION 1..9: note = short peptide
QEGGGGVAA

SEQ ID NO: 964 - protein, 9 aa, synthetic construct
  REGION 1..9: note = short peptide
AESTWQCPP

SEQ ID NO: 965 - protein, 9 aa, synthetic construct
  REGION 1..9: note = short peptide
KEQEPQKSK

SEQ ID NO: 966 - protein, 10 aa, synthetic construct
  REGION 1..10: note = short peptide
HTDCPGHADY

SEQ ID NO: 967 - protein, 9 aa, synthetic construct
  REGION 1..9: note = short peptide
NSELSCQLY

SEQ ID NO: 968 - protein, 11 aa, synthetic construct
  REGION 1..11: note = short peptide
TTDFPGNYSGY

SEQ ID NO: 969 - protein, 12 aa, synthetic construct
  REGION 1..12: note = short peptide
MTDVDRNGTTAY

SEQ ID NO: 970 - protein, 9 aa, synthetic construct
  REGION 1..9: note = short peptide
QAIHAQASA

SEQ ID NO: 971 - protein, 8 aa, synthetic construct
  REGION 1..8: note = short peptide
TEPRLGGH

SEQ ID NO: 972 - protein, 9 aa, synthetic construct
  REGION 1..9: note = short peptide
TEEEKNFKA

SEQ ID NO: 973 - protein, 9 aa, synthetic construct
  REGION 1..9: note = short peptide
TDKSDKYDA

SEQ ID NO: 974 - protein, 9 aa, synthetic construct
  REGION 1..9: note = short peptide
ISEDKNPDY

SEQ ID NO: 975 - protein, 11 aa, synthetic construct
  REGION 1..11: note = short peptide
ATAEVLNIGKK

SEQ ID NO: 976 - protein, 11 aa, synthetic construct
  REGION 1..11: note = short peptide
AESSPGRGSSV

SEQ ID NO: 977 - protein, 9 aa, synthetic construct
  REGION 1..9: note = short peptide
AEASPVKAS

SEQ ID NO: 978 - protein, 8 aa, synthetic construct
  REGION 1..8: note = short peptide
FGGEPLSY

SEQ ID NO: 979 - protein, 9 aa, synthetic construct
  REGION 1..9: note = short peptide
EAAGPEPPP

SEQ ID NO: 980 - protein, 9 aa, synthetic construct
  REGION 1..9: note = short peptide
HQDNHPLAS

SEQ ID NO: 981 - protein, 10 aa, synthetic construct
  REGION 1..10: note = short peptide
MTCHGEPSLY

SEQ ID NO: 982 - protein, 8 aa, synthetic construct
  REGION 1..8: note = short peptide
CEIKQPVF

SEQ ID NO: 983 - protein, 9 aa, synthetic construct
  REGION 1..9: note = short peptide
AECEGGSTP

SEQ ID NO: 984 - protein, 10 aa, synthetic construct
  REGION 1..10: note = short peptide
SEIQLNNKVA

SEQ ID NO: 985 - protein, 9 aa, synthetic construct
  REGION 1..9: note = short peptide
QAIHAQASA

SEQ ID NO: 986 - protein, 8 aa, synthetic construct
  REGION 1..8: note = short peptide
TLSGHGPL

SEQ ID NO: 987 - protein, 9 aa, synthetic construct
  REGION 1..9: note = short peptide
THRNTVTEV

SEQ ID NO: 988 - protein, 9 aa, synthetic construct
  REGION 1..9: note = short peptide
QENERKVAQ

SEQ ID NO: 989 - protein, 8 aa, synthetic construct
  REGION 1..8: note = short peptide
TNAAKIFN

SEQ ID NO: 990 - protein, 8 aa, synthetic construct
  REGION 1..8: note = short peptide
STDKQMGY

SEQ ID NO: 991 - protein, 11 aa, synthetic construct
  REGION 1..11: note = short peptide
STDSGLGLGCY

SEQ ID NO: 992 - protein, 8 aa, synthetic construct
  REGION 1..8: note = short peptide
SPCSSDGP

SEQ ID NO: 993 - protein, 8 aa, synthetic construct
  REGION 1..8: note = short peptide
ESHRVAGE

SEQ ID NO: 994 - protein, 9 aa, synthetic construct
  REGION 1..9: note = short peptide
TDGPLVTDP

SEQ ID NO: 995 - protein, 9 aa, synthetic construct
  REGION 1..9: note = short peptide
SDDVPMVLV

SEQ ID NO: 996 - protein, 8 aa, synthetic construct
  REGION 1..8: note = short peptide
DNMGAYTV

SEQ ID NO: 997 - protein, 8 aa, synthetic construct
  REGION 1..8: note = short peptide
SDMLGSLY

SEQ ID NO: 998 - protein, 9 aa, synthetic construct
  REGION 1..9: note = short peptide
GDSQPAAAA

SEQ ID NO: 999 - protein, 9 aa, synthetic construct
  REGION 1..9: note = short peptide
TAGVVEKMQ

SEQ ID NO: 1000 - protein, 9 aa, synthetic construct
  REGION 1..9: note = short peptide
SESSPSRCP

SEQ ID NO: 1001 - protein, 15 aa, synthetic construct
  REGION 1..15: note = short peptide
DLGSLSSAREIENLP

SEQ ID NO: 1002 - protein, 9 aa, synthetic construct
  REGION 1..9: note = short peptide
NINPLTMCL

SEQ ID NO: 1003 - protein, 13 aa, synthetic construct
  REGION 1..13: note = short peptide
AKSKNHTTHNQSR

SEQ ID NO: 1004 - protein, 9 aa, synthetic construct
  REGION 1..9: note = short peptide
KTDKHMQKY

SEQ ID NO: 1005 - protein, 9 aa, synthetic construct
  REGION 1..9: note = short peptide
ADTGSGKTA

SEQ ID NO: 1006 - protein, 10 aa, synthetic construct
  REGION 1..10: note = short peptide
MMDPNSTQRY

SEQ ID NO: 1007 - protein, 14 aa, synthetic construct
  REGION 1..14: note = short peptide
AEAESMYQIKYEEL

SEQ ID NO: 1008 - protein, 9 aa, synthetic construct
  REGION 1..9: note = short peptide
KTDKHVQKY

SEQ ID NO: 1009 - protein, 9 aa, synthetic construct
  REGION 1..9: note = short peptide
LGSGPQDSL

SEQ ID NO: 1010 - protein, 10 aa, synthetic construct
  REGION 1..10: note = short peptide
VTDDSPKYNY

SEQ ID NO: 1011 - protein, 10 aa, synthetic construct
  REGION 1..10: note = short peptide
VSDNGPCLGY

SEQ ID NO: 1012 - protein, 10 aa, synthetic construct
  REGION 1..10: note = short peptide
VSDPLSDLKF

SEQ ID NO: 1013 - protein, 12 aa, synthetic construct
  REGION 1..12: note = short peptide
YSDPSTGEPATY

SEQ ID NO: 1014 - protein, 10 aa, synthetic construct
  REGION 1..10: note = short peptide
PPKDDKKKKD

SEQ ID NO: 1015 - protein, 13 aa, synthetic construct
  REGION 1..13: note = short peptide
PPKDDKKKKDAGK

SEQ ID NO: 1016 - protein, 10 aa, synthetic construct
  REGION 1..10: note = short peptide
ISDPSNCSQY

SEQ ID NO: 1017 - protein, 10 aa, synthetic construct
  REGION 1..10: note = short peptide
YSDKYFDEHY

SEQ ID NO: 1018 - protein, 10 aa, synthetic construct
  REGION 1..10: note = short peptide
KMLPDKDCRY

SEQ ID NO: 1019 - protein, 11 aa, synthetic construct
  REGION 1..11: note = short peptide
MEMLCAGRVPA

SEQ ID NO: 1020 - protein, 9 aa, synthetic construct
  REGION 1..9: note = short peptide
AECKEKFAA

SEQ ID NO: 1021 - protein, 10 aa, synthetic construct
  REGION 1..10: note = short peptide
AEHPIVIVCG

SEQ ID NO: 1022 - protein, 9 aa, synthetic construct
  REGION 1..9: note = short peptide
HQQAEVFIV

SEQ ID NO: 1023 - protein, 10 aa, synthetic construct
  REGION 1..10: note = short peptide
ESIDDYVNVP

SEQ ID NO: 1024 - protein, 11 aa, synthetic construct
  REGION 1..11: note = short peptide
ASDPASSTSCY

SEQ ID NO: 1025 - protein, 11 aa, synthetic construct
  REGION 1..11: note = short peptide
CEYLIGQHVTA

SEQ ID NO: 1026 - protein, 11 aa, synthetic construct
  REGION 1..11: note = short peptide
CSDKPKSGAKY

SEQ ID NO: 1027 - protein, 9 aa, synthetic construct
  REGION 1..9: note = short peptide
DSDSCHFNY

SEQ ID NO: 1028 - protein, 10 aa, synthetic construct
  REGION 1..10: note = short peptide
AEAFPSGCTA

SEQ ID NO: 1029 - protein, 9 aa, synthetic construct
  REGION 1..9: note = short peptide
THRNTVTEV

SEQ ID NO: 1030 - protein, 9 aa, synthetic construct
  REGION 1..9: note = short peptide
QENERKVAQ

SEQ ID NO: 1031 - protein, 8 aa, synthetic construct
  REGION 1..8: note = short peptide
TNAAKIFN

SEQ ID NO: 1032 - protein, 11 aa, synthetic construct
  REGION 1..11: note = short peptide
STDSGLGLGCY

SEQ ID NO: 1033 - protein, 8 aa, synthetic construct
  REGION 1..8: note = short peptide
SPCSSDGP

SEQ ID NO: 1034 - protein, 9 aa, synthetic construct
  REGION 1..9: note = short peptide
GDSQPAAAA

SEQ ID NO: 1035 - protein, 9 aa, synthetic construct
  REGION 1..9: note = short peptide
SESSPSRCP

SEQ ID NO: 1036 - protein, 9 aa, synthetic construct
  REGION 1..9: note = short peptide
NINPLTMCL

SEQ ID NO: 1037 - protein, 10 aa, synthetic construct
  REGION 1..10: note = short peptide
VSDNGPCLGY

SEQ ID NO: 1038 - protein, 10 aa, synthetic construct
  REGION 1..10: note = short peptide
ISDPSNCSQY

SEQ ID NO: 1039 - protein, 10 aa, synthetic construct
  REGION 1..10: note = short peptide
KMLPDKDCRY

SEQ ID NO: 1040 - protein, 9 aa, synthetic construct
  REGION 1..9: note = short peptide
AEAETAKSA

SEQ ID NO: 1041 - protein, 9 aa, synthetic construct
  REGION 1..9: note = short peptide
AEEKENHCP

SEQ ID NO: 1042 - protein, 12 aa, synthetic construct
  REGION 1..12: note = short peptide
AAAAASRGVGAK

SEQ ID NO: 1043 - protein, 9 aa, synthetic construct
  REGION 1..9: note = short peptide
EADPGSAAP

SEQ ID NO: 1044 - protein, 10 aa, synthetic construct
  REGION 1..10: note = short peptide
SVDPDAECKY

SEQ ID NO: 1045 - protein, 8 aa, synthetic construct
  REGION 1..8: note = short peptide
STDKQMGY

SEQ ID NO: 1046 - protein, 12 aa, synthetic construct
  REGION 1..12: note = short peptide
AASAKKKNKKGK

SEQ ID NO: 1047 - protein, 8 aa, synthetic construct
  REGION 1..8: note = short peptide
DSHRVGAA

SEQ ID NO: 1048 - protein, 8 aa, synthetic construct
  REGION 1..8: note = short peptide
ECAGPPVP

SEQ ID NO: 1049 - protein, 10 aa, synthetic construct
  REGION 1..10: note = short peptide
YSDSLVQKGY

SEQ ID NO: 1050 - protein, 10 aa, synthetic construct
  REGION 1..10: note = short peptide
SSDNSRSLLS

SEQ ID NO: 1051 - protein, 11 aa, synthetic construct
  REGION 1..11: note = short peptide
TAATAPGADTA

SEQ ID NO: 1052 - protein, 15 aa, synthetic construct
  REGION 1..15: note = short peptide
APAQKAPAPKASGKK

SEQ ID NO: 1053 - protein, 12 aa, synthetic construct
  REGION 1..12: note = short peptide
ASSDIQVKELEK

SEQ ID NO: 1054 - protein, 8 aa, synthetic construct
  REGION 1..8: note = short peptide
ATRGHVQD

SEQ ID NO: 1055 - protein, 9 aa, synthetic construct
  REGION 1..9: note = short peptide
TTDKKSLAY

SEQ ID NO: 1056 - protein, 10 aa, synthetic construct
  REGION 1..10: note = short peptide
TTDDWKDFLY

SEQ ID NO: 1057 - protein, 9 aa, synthetic construct
  REGION 1..9: note = short peptide
TRTQAAAVQ

SEQ ID NO: 1058 - protein, 10 aa, synthetic construct
  REGION 1..10: note = short peptide
TSDLQDKNEY

SEQ ID NO: 1059 - protein, 9 aa, synthetic construct
  REGION 1..9: note = short peptide
AESTPSKSA

SEQ ID NO: 1060 - protein, 9 aa, synthetic construct
  REGION 1..9: note = short peptide
TEEEKNFKA

SEQ ID NO: 1061 - protein, 10 aa, synthetic construct
  REGION 1..10: note = short peptide
VTDDSPKYNY

SEQ ID NO: 1062 - protein, 11 aa, synthetic construct
  REGION 1..11: note = short peptide
AESNSISRITA

SEQ ID NO: 1063 - protein, 8 aa, synthetic construct
  REGION 1..8: note = short peptide
DDNGSKGY

SEQ ID NO: 1064 - protein, 10 aa, synthetic construct
  REGION 1..10: note = short peptide
AEVAKITAEA

SEQ ID NO: 1065 - protein, 9 aa, synthetic construct
  REGION 1..9: note = short peptide
TDHGSDHHY

SEQ ID NO: 1066 - protein, 11 aa, synthetic construct
  REGION 1..11: note = short peptide
CLIKEVDIYTV

SEQ ID NO: 1067 - protein, 8 aa, synthetic construct
  REGION 1..8: note = short peptide
DAGRIHAG

SEQ ID NO: 1068 - protein, 15 aa, synthetic construct
  REGION 1..15: note = short peptide
CHRAVLSACSSYFRA

SEQ ID NO: 1069 - protein, 8 aa, synthetic construct
  REGION 1..8: note = short peptide
NTDSPLRY

SEQ ID NO: 1070 - protein, 9 aa, synthetic construct
  REGION 1..9: note = short peptide
KAMEEKLEA

SEQ ID NO: 1071 - protein, 11 aa, synthetic construct
  REGION 1..11: note = short peptide
ISEQTGKELLY

SEQ ID NO: 1072 - protein, 12 aa, synthetic construct
  REGION 1..12: note = short peptide
MTDVDRNGTTAY

SEQ ID NO: 1073 - protein, 9 aa, synthetic construct
  REGION 1..9: note = short peptide
KEADYRVQP

SEQ ID NO: 1074 - protein, 12 aa, synthetic construct
  REGION 1..12: note = short peptide
QSESETAGSTKY

SEQ ID NO: 1075 - protein, 14 aa, synthetic construct
  REGION 1..14: note = short peptide
MDGIVPDIAVGTKR

SEQ ID NO: 1076 - protein, 10 aa, synthetic construct
  REGION 1..10: note = short peptide
KLAELKQECL

SEQ ID NO: 1077 - protein, 10 aa, synthetic construct
  REGION 1..10: note = short peptide
LLDPAQKNLY

SEQ ID NO: 1078 - protein, 12 aa, synthetic construct
  REGION 1..12: note = short peptide
LLNSSSAIYSKY

SEQ ID NO: 1079 - protein, 12 aa, synthetic construct
  REGION 1..12: note = short peptide
KGGKGLGKGGAK

SEQ ID NO: 1080 - protein, 8 aa, synthetic construct
  REGION 1..8: note = short peptide
KGGKGLGK

SEQ ID NO: 1081 - protein, 12 aa, synthetic construct
  REGION 1..12: note = short peptide
SGRGKGGKGLGK

SEQ ID NO: 1082 - protein, 15 aa, synthetic construct
  REGION 1..15: note = short peptide
SGRGKGGKGLGKGGA

SEQ ID NO: 1083 - protein, 11 aa, synthetic construct
  REGION 1..11: note = short peptide
SGRGKQGGKAR

SEQ ID NO: 1084 - protein, 13 aa, synthetic construct
  REGION 1..13: note = short peptide
SFTTRSTFSTNYR

SEQ ID NO: 1085 - protein, 8 aa, synthetic construct
  REGION 1..8: note = short peptide
GESWEYQI

SEQ ID NO: 1086 - protein, 9 aa, synthetic construct
  REGION 1..9: note = short peptide
SESSPSRCP

SEQ ID NO: 1087 - protein, 14 aa, synthetic construct
  REGION 1..14: note = short peptide
SESSSKSSQPLASK

SEQ ID NO: 1088 - protein, 10 aa, synthetic construct
  REGION 1..10: note = short peptide
SDMLLPLDGE

SEQ ID NO: 1089 - protein, 9 aa, synthetic construct
  REGION 1..9: note = short peptide
SPTPGVGSL

SEQ ID NO: 1090 - protein, 14 aa, synthetic construct
  REGION 1..14: note = short peptide
RGKAGKGLGKGGAK

SEQ ID NO: 1091 - protein, 11 aa, synthetic construct
  REGION 1..11: note = short peptide
REKEFKAKEAA

SEQ ID NO: 1092 - protein, 9 aa, synthetic construct
  REGION 1..9: note = short peptide
KYVINAIPP

SEQ ID NO: 1093 - protein, 9 aa, synthetic construct
  REGION 1..9: note = short peptide
KPTAEVKWY

SEQ ID NO: 1094 - protein, 9 aa, synthetic construct
  REGION 1..9: note = short peptide
SEAHCHYVV

SEQ ID NO: 1095 - protein, 9 aa, synthetic construct
  REGION 1..9: note = short peptide
YSCPNEQRY

SEQ ID NO: 1096 - protein, 10 aa, synthetic construct
  REGION 1..10: note = short peptide
GCEEPATHNA

SEQ ID NO: 1097 - protein, 10 aa, synthetic construct
  REGION 1..10: note = short peptide
ISNKLFVLDA

SEQ ID NO: 1098 - protein, 9 aa, synthetic construct
  REGION 1..9: note = short peptide
KECGKAFTV

SEQ ID NO: 1099 - protein, 9 aa, synthetic construct
  REGION 1..9: note = short peptide
CVTDISHLV

SEQ ID NO: 1100 - protein, 10 aa, synthetic construct
  REGION 1..10: note = short peptide
ESHGSLGAQA

SEQ ID NO: 1101 - protein, 9 aa, synthetic construct
  REGION 1..9: note = short peptide
DEAKVCMVY

SEQ ID NO: 1102 - protein, 9 aa, synthetic construct
  REGION 1..9: note = short peptide
DEAKVCMVY

SEQ ID NO: 1103 - protein, 9 aa, synthetic construct
  REGION 1..9: note = short peptide
MESCSVAQA

SEQ ID NO: 1104 - protein, 9 aa, synthetic construct
  REGION 1..9: note = short peptide
QTNGCLNGY

SEQ ID NO: 1105 - protein, 12 aa, synthetic construct
  REGION 1..12: note = short peptide
QTCSARLSEDLY

SEQ ID NO: 1106 - protein, 9 aa, synthetic construct
  REGION 1..9: note = short peptide
LSDPGVCVS

SEQ ID NO: 1107 - protein, 9 aa, synthetic construct
  REGION 1..9: note = short peptide
MECNGAISA

SEQ ID NO: 1108 - protein, 9 aa, synthetic construct
  REGION 1..9: note = short peptide
AEEKENHCP

SEQ ID NO: 1109 - protein, 8 aa, synthetic construct
  REGION 1..8: note = short peptide
ECAGPPVP

SEQ ID NO: 1110 - protein, 10 aa, synthetic construct
  REGION 1..10: note = short peptide
TTDDWKDFLY

SEQ ID NO: 1111 - protein, 11 aa, synthetic construct
  REGION 1..11: note = short peptide
CLIKEVDIYTV

SEQ ID NO: 1112 - protein, 15 aa, synthetic construct
  REGION 1..15: note = short peptide
CHRAVLSACSSYFRA

SEQ ID NO: 1113 - protein, 10 aa, synthetic construct
  REGION 1..10: note = short peptide
KLAELKQECL

SEQ ID NO: 1114 - protein, 8 aa, synthetic construct
  REGION 1..8: note = short peptide
GESWEYQI

SEQ ID NO: 1115 - protein, 9 aa, synthetic construct
  REGION 1..9: note = short peptide
KYVINAIPP

SEQ ID NO: 1116 - protein, 9 aa, synthetic construct
  REGION 1..9: note = short peptide
QTNGCLNGY

SEQ ID NO: 1117 - protein, 9 aa, synthetic construct
  REGION 1..9: note = short peptide
QTNGCLNGY

SEQ ID NO: 1118 - protein, 15 aa, synthetic construct
  REGION 1..15: note = short peptide
FVTPLTSMVVTKPDD

SEQ ID NO: 1119 - protein, 15 aa, synthetic construct
  REGION 1..15: note = short peptide
SDKPDMAEIEKFDKS

SEQ ID NO: 1120 - protein, 15 aa, synthetic construct
  REGION 1..15: note = short peptide
FVTPLTSMVVTKPED

SEQ ID NO: 1121 - protein, 9 aa, synthetic construct
  REGION 1..9: note = short peptide
YLFCDDHKL

SEQ ID NO: 1122 - protein, 8 aa, synthetic construct
  REGION 1..8: note = short peptide
LTVVGPVL

SEQ ID NO: 1123 - protein, 15 aa, synthetic construct
  REGION 1..15: note = short peptide
TTTTTFKGVDPNSRN

SEQ ID NO: 1124 - protein, 15 aa, synthetic construct
  REGION 1..15: note = short peptide
SDKPDMAEIEKFDKS

SEQ ID NO: 1125 - protein, 11 aa, synthetic construct
  REGION 1..11: note = short peptide
FLDPGGPMMKL

SEQ ID NO: 1126 - protein, 9 aa, synthetic construct
  REGION 1..9: note = short peptide
TPATPTSQF

SEQ ID NO: 1127 - protein, 15 aa, synthetic construct
  REGION 1..15: note = short peptide
SEKKQPVDLGLLEED

SEQ ID NO: 1128 - protein, 10 aa, synthetic construct
  REGION 1..10: note = short peptide
SGPYRGGYGG

SEQ ID NO: 1129 - protein, 15 aa, synthetic construct
  REGION 1..15: note = short peptide
TVETRDGQVINETSQ

SEQ ID NO: 1130 - protein, 9 aa, synthetic construct
  REGION 1..9: note = short peptide
GIRLPAPSK

SEQ ID NO: 1131 - protein, 10 aa, synthetic construct
  REGION 1..10: note = short peptide
AVHCMGILVK

SEQ ID NO: 1132 - protein, 13 aa, synthetic construct
  REGION 1..13: note = short peptide
SDKPDMAEIEKFD

SEQ ID NO: 1133 - protein, 10 aa, synthetic construct
  REGION 1..10: note = short peptide
AVHCMGILVK

SEQ ID NO: 1134 - protein, 12 aa, synthetic construct
  REGION 1..12: note = short peptide
SAARESHPHGVK

SEQ ID NO: 1135 - protein, 15 aa, synthetic construct
  REGION 1..15: note = short peptide
ADKPDMGEIASFDKA

SEQ ID NO: 1136 - protein, 13 aa, synthetic construct
  REGION 1..13: note = short peptide
SDKPDMAEIEKFD

SEQ ID NO: 1137 - protein, 9 aa, synthetic construct
  REGION 1..9: note = short peptide
GLCPRPVLV

SEQ ID NO: 1138 - protein, 8 aa, synthetic construct
  REGION 1..8: note = short peptide
DHWTTRCP

SEQ ID NO: 1139 - protein, 8 aa, synthetic construct
  REGION 1..8: note = short peptide
HHWVPRKA

SEQ ID NO: 1140 - protein, 15 aa, synthetic construct
  REGION 1..15: note = short peptide
FVTPLTSMVVTKPED

SEQ ID NO: 1141 - protein, 11 aa, synthetic construct
  REGION 1..11: note = short peptide
TECEGDIQKNY

SEQ ID NO: 1142 - protein, 11 aa, synthetic construct
  REGION 1..11: note = short peptide
GLMGPRGPPGA

SEQ ID NO: 1143 - protein, 12 aa, synthetic construct
  REGION 1..12: note = short peptide
GLFSGDPNWFPK

SEQ ID NO: 1144 - protein, 14 aa, synthetic construct
  REGION 1..14: note = short peptide
RDALNIETAIKTKG

SEQ ID NO: 1145 - protein, 10 aa, synthetic construct
  REGION 1..10: note = short peptide
SGQSGPRGAP

SEQ ID NO: 1146 - protein, 9 aa, synthetic construct
  REGION 1..9: note = short peptide
NLWNSTHHV

SEQ ID NO: 1147 - protein, 14 aa, synthetic construct
  REGION 1..14: note = short peptide
SQATNYGEDLTKNH

SEQ ID NO: 1148 - protein, 9 aa, synthetic construct
  REGION 1..9: note = short peptide
KVNSLNKTK

SEQ ID NO: 1149 - protein, 9 aa, synthetic construct
  REGION 1..9: note = short peptide
VMIGSPKKV

SEQ ID NO: 1150 - protein, 13 aa, synthetic construct
  REGION 1..13: note = short peptide
TSTQTMGPRPAAA

SEQ ID NO: 1151 - protein, 9 aa, synthetic construct
  REGION 1..9: note = short peptide
MKLLLLHPA

SEQ ID NO: 1152 - protein, 8 aa, synthetic construct
  REGION 1..8: note = short peptide
YIDGPHCV

SEQ ID NO: 1153 - protein, 14 aa, synthetic construct
  REGION 1..14: note = short peptide
ASSNSAQGSDVSLT

SEQ ID NO: 1154 - protein, 9 aa, synthetic construct
  REGION 1..9: note = short peptide
HMLDPVFYL

SEQ ID NO: 1155 - protein, 12 aa, synthetic construct
  REGION 1..12: note = short peptide
GLFSGDPNWFPK

SEQ ID NO: 1156 - protein, 9 aa, synthetic construct
  REGION 1..9: note = short peptide
KVNSLNKTK

SEQ ID NO: 1157 - protein, 10 aa, synthetic construct
  REGION 1..10: note = short peptide
RVLPAPMLQY

SEQ ID NO: 1158 - protein, 15 aa, synthetic construct
  REGION 1..15: note = short peptide
TPGKKGAAIPAKGAK

SEQ ID NO: 1159 - protein, 15 aa, synthetic construct
  REGION 1..15: note = short peptide
SGRGTGQMEGRFTGQ

SEQ ID NO: 1160 - protein, 10 aa, synthetic construct
  REGION 1..10: note = short peptide
KLYTYIQSRF

SEQ ID NO: 1161 - protein, 14 aa, synthetic construct
  REGION 1..14: note = short peptide
GGAAAAAAAPAAPA

SEQ ID NO: 1162 - protein, 12 aa, synthetic construct
  REGION 1..12: note = short peptide
SDKPDMAEIEKF

SEQ ID NO: 1163 - protein, 15 aa, synthetic construct
  REGION 1..15: note = short peptide
AGAGKVTKSAQKAQK

SEQ ID NO: 1164 - protein, 15 aa, synthetic construct
  REGION 1..15: note = short peptide
HFDLSHGSAQVKGHG

SEQ ID NO: 1165 - protein, 9 aa, synthetic construct
  REGION 1..9: note = short peptide
YVLNGTFSL

SEQ ID NO: 1166 - protein, 15 aa, synthetic construct
  REGION 1..15: note = short peptide
EKNTLPTKETIEQEK

SEQ ID NO: 1167 - protein, 11 aa, synthetic construct
  REGION 1..11: note = short peptide
TCGIADKPMTQ

SEQ ID NO: 1168 - protein, 11 aa, synthetic construct
  REGION 1..11: note = short peptide
LRQDLRDGVIL

SEQ ID NO: 1169 - protein, 10 aa, synthetic construct
  REGION 1..10: note = short peptide
SFFNFRKIFK

SEQ ID NO: 1170 - protein, 10 aa, synthetic construct
  REGION 1..10: note = short peptide
GLYGNFTAQV

SEQ ID NO: 1171 - protein, 10 aa, synthetic construct
  REGION 1..10: note = short peptide
AEGSPPPKTY

SEQ ID NO: 1172 - protein, 8 aa, synthetic construct
  REGION 1..8: note = short peptide
KQLATKAA

SEQ ID NO: 1173 - protein, 13 aa, synthetic construct
  REGION 1..13: note = short peptide
MFSSSAKIVKPNG

SEQ ID NO: 1174 - protein, 9 aa, synthetic construct
  REGION 1..9: note = short peptide
KILEKIFKI

SEQ ID NO: 1175 - protein, 14 aa, synthetic construct
  REGION 1..14: note = short peptide
SLIQTKCADDAMTL

SEQ ID NO: 1176 - protein, 9 aa, synthetic construct
  REGION 1..9: note = short peptide
DYTINVWDV

SEQ ID NO: 1177 - protein, 11 aa, synthetic construct
  REGION 1..11: note = short peptide
VMFECDKGFYL

SEQ ID NO: 1178 - protein, 9 aa, synthetic construct
  REGION 1..9: note = short peptide
HLFGECLFI

SEQ ID NO: 1179 - protein, 9 aa, synthetic construct
  REGION 1..9: note = short peptide
SESCLFRFF

SEQ ID NO: 1180 - protein, 9 aa, synthetic construct
  REGION 1..9: note = short peptide
DYTINVWDV

SEQ ID NO: 1181 - protein, 11 aa, synthetic construct
  REGION 1..11: note = short peptide
GMLSPGKSIEV

SEQ ID NO: 1182 - protein, 15 aa, synthetic construct
  REGION 1..15: note = short peptide
SNKGAIIGLMVGGVV

SEQ ID NO: 1183 - protein, 11 aa, synthetic construct
  REGION 1..11: note = short peptide
DGARPPGAQGL

SEQ ID NO: 1184 - protein, 13 aa, synthetic construct
  REGION 1..13: note = short peptide
ASNDYTQQATQSY

SEQ ID NO: 1185 - protein, 15 aa, synthetic construct
  REGION 1..15: note = short peptide
YGTGYFGQGRGGGGY

SEQ ID NO: 1186 - protein, 14 aa, synthetic construct
  REGION 1..14: note = short peptide
SRGGYGGGGPGYGN

SEQ ID NO: 1187 - protein, 11 aa, synthetic construct
  REGION 1..11: note = short peptide
KLLNGSQRVVM

SEQ ID NO: 1188 - protein, 15 aa, synthetic construct
  REGION 1..15: note = short peptide
PLPSKETIEQEKQAG

SEQ ID NO: 1189 - protein, 11 aa, synthetic construct
  REGION 1..11: note = short peptide
IGFPGPPGPKG

SEQ ID NO: 1190 - protein, 10 aa, synthetic construct
  REGION 1..10: note = short peptide
VLASPLKTGR

SEQ ID NO: 1191 - protein, 12 aa, synthetic construct
  REGION 1..12: note = short peptide
GECGIAYGDKRY

SEQ ID NO: 1192 - protein, 12 aa, synthetic construct
  REGION 1..12: note = short peptide
KLIDECVSQIVL

SEQ ID NO: 1193 - protein, 13 aa, synthetic construct
  REGION 1..13: note = short peptide
KLLDFCKSKDIVL

SEQ ID NO: 1194 - protein, 9 aa, synthetic construct
  REGION 1..9: note = short peptide
MLFPGCVHL

SEQ ID NO: 1195 - protein, 15 aa, synthetic construct
  REGION 1..15: note = short peptide
SNKGAIIGLMVGGVV

SEQ ID NO: 1196 - protein, 11 aa, synthetic construct
  REGION 1..11: note = short peptide
DGARPPGAQGL

SEQ ID NO: 1197 - protein, 15 aa, synthetic construct
  REGION 1..15: note = short peptide
PLPSKETIEQEKQAG

SEQ ID NO: 1198 - protein, 12 aa, synthetic construct
  REGION 1..12: note = short peptide
LTLDPNVTGVFL

SEQ ID NO: 1199 - protein, 8 aa, synthetic construct
  REGION 1..8: note = short peptide
KSPSINTI

SEQ ID NO: 1200 - protein, 9 aa, synthetic construct
  REGION 1..9: note = short peptide
MNNHVSSKP

SEQ ID NO: 1201 - protein, 10 aa, synthetic construct
  REGION 1..10: note = short peptide
MLGGSAGRLK

SEQ ID NO: 1202 - protein, 8 aa, synthetic construct
  REGION 1..8: note = short peptide
KAIAVTVQ

SEQ ID NO: 1203 - protein, 15 aa, synthetic construct
  REGION 1..15: note = short peptide
RGGYGGGGGYGGSSF

SEQ ID NO: 1204 - protein, 14 aa, synthetic construct
  REGION 1..14: note = short peptide
RGVSHAMGGRGGIN

SEQ ID NO: 1205 - protein, 15 aa, synthetic construct
  REGION 1..15: note = short peptide
KGAAIPAKGAKNGKN

SEQ ID NO: 1206 - protein, 10 aa, synthetic construct
  REGION 1..10: note = short peptide
VLDELKNMKC

SEQ ID NO: 1207 - protein, 10 aa, synthetic construct
  REGION 1..10: note = short peptide
YLFDRNGVCL

SEQ ID NO: 1208 - protein, 13 aa, synthetic construct
  REGION 1..13: note = short peptide
SSSVEQKKGPTRQ

SEQ ID NO: 1209 - protein, 11 aa, synthetic construct
  REGION 1..11: note = short peptide
ADFDTYDDRAY

SEQ ID NO: 1210 - protein, 15 aa, synthetic construct
  REGION 1..15: note = short peptide
SYSRGGGDQGYGSGR

SEQ ID NO: 1211 - protein, 12 aa, synthetic construct
  REGION 1..12: note = short peptide
AEGDEAARGQQP

SEQ ID NO: 1212 - protein, 10 aa, synthetic construct
  REGION 1..10: note = short peptide
GENSGIGKLF

SEQ ID NO: 1213 - protein, 13 aa, synthetic construct
  REGION 1..13: note = short peptide
ADPKYADLPGIAR

SEQ ID NO: 1214 - protein, 11 aa, synthetic construct
  REGION 1..11: note = short peptide
SGNDGGLLSGS

SEQ ID NO: 1215 - protein, 11 aa, synthetic construct
  REGION 1..11: note = short peptide
TCGIADKPMTQ

SEQ ID NO: 1216 - protein, 14 aa, synthetic construct
  REGION 1..14: note = short peptide
SLIQTKCADDAMTL

SEQ ID NO: 1217 - protein, 15 aa, synthetic construct
  REGION 1..15: note = short peptide
SPNIVIALAGNKADL

SEQ ID NO: 1218 - protein, 9 aa, synthetic construct
  REGION 1..9: note = short peptide
ESGNLRKAI

SEQ ID NO: 1219 - protein, 9 aa, synthetic construct
  REGION 1..9: note = short peptide
NHTKALERV

SEQ ID NO: 1220 - protein, 11 aa, synthetic construct
  REGION 1..11: note = short peptide
FPTVPCPLHVF

SEQ ID NO: 1221 - protein, 11 aa, synthetic construct
  REGION 1..11: note = short peptide
RVLGPCALLPH

SEQ ID NO: 1222 - protein, 9 aa, synthetic construct
  REGION 1..9: note = short peptide
KMPCQLHQV

SEQ ID NO: 1223 - protein, 8 aa, synthetic construct
  REGION 1..8: note = short peptide
HRHFQHHA

SEQ ID NO: 1224 - protein, 9 aa, synthetic construct
  REGION 1..9: note = short peptide
EHFTDFNAT

SEQ ID NO: 1225 - protein, 12 aa, synthetic construct
  REGION 1..12: note = short peptide
LLWAFCAPGARA

SEQ ID NO: 1226 - protein, 8 aa, synthetic construct
  REGION 1..8: note = short peptide
KAIAVTVQ

SEQ ID NO: 1227 - protein, 10 aa, synthetic construct
  REGION 1..10: note = short peptide
VLDELKNMKC

SEQ ID NO: 1228 - protein, 10 aa, synthetic construct
  REGION 1..10: note = short peptide
YLFDRNGVCL

SEQ ID NO: 1229 - protein, 11 aa, synthetic construct
  REGION 1..11: note = short peptide
SGNDGGLLSGS

SEQ ID NO: 1230 - protein, 11 aa, synthetic construct
  REGION 1..11: note = short peptide
TCGIADKPMTQ

SEQ ID NO: 1231 - protein, 11 aa, synthetic construct
  REGION 1..11: note = short peptide
ALSEAMGLFCL

SEQ ID NO: 1232 - protein, 12 aa, synthetic construct
  REGION 1..12: note = short peptide
SNRGASQAGMTG

SEQ ID NO: 1233 - protein, 15 aa, synthetic construct
  REGION 1..15: note = short peptide
KGAAIPAKGAKNGKN

SEQ ID NO: 1234 - protein, 13 aa, synthetic construct
  REGION 1..13: note = short peptide
SRGGGDQGYGSGR

SEQ ID NO: 1235 - protein, 10 aa, synthetic construct
  REGION 1..10: note = short peptide
KEPMNPIKQY

SEQ ID NO: 1236 - protein, 15 aa, synthetic construct
  REGION 1..15: note = short peptide
SSVAVLTQESFAEHR

SEQ ID NO: 1237 - protein, 15 aa, synthetic construct
  REGION 1..15: note = short peptide
SSRGGYGGGGPGYGN

SEQ ID NO: 1238 - protein, 10 aa, synthetic construct
  REGION 1..10: note = short peptide
LAFEGTPEQK

SEQ ID NO: 1239 - protein, 9 aa, synthetic construct
  REGION 1..9: note = short peptide
TVNSPAIYK

SEQ ID NO: 1240 - protein, 10 aa, synthetic construct
  REGION 1..10: note = short peptide
LLYGPPGTGK

SEQ ID NO: 1241 - protein, 12 aa, synthetic construct
  REGION 1..12: note = short peptide
MESAIAEGGASR

SEQ ID NO: 1242 - protein, 12 aa, synthetic construct
  REGION 1..12: note = short peptide
MEGSPTGTTVMR

SEQ ID NO: 1243 - protein, 15 aa, synthetic construct
  REGION 1..15: note = short peptide
MDTSRVQPIKLARVT

SEQ ID NO: 1244 - protein, 11 aa, synthetic construct
  REGION 1..11: note = short peptide
KMPKFSVPGFK

SEQ ID NO: 1245 - protein, 10 aa, synthetic construct
  REGION 1..10: note = short peptide
KMGGIKGLFK

SEQ ID NO: 1246 - protein, 10 aa, synthetic construct
  REGION 1..10: note = short peptide
KLPDSPALAK

SEQ ID NO: 1247 - protein, 12 aa, synthetic construct
  REGION 1..12: note = short peptide
TPLTSMVVTKPD

SEQ ID NO: 1248 - protein, 11 aa, synthetic construct
  REGION 1..11: note = short peptide
KIPIKRADMLK

SEQ ID NO: 1249 - protein, 9 aa, synthetic construct
  REGION 1..9: note = short peptide
DHFATIRTA

SEQ ID NO: 1250 - protein, 11 aa, synthetic construct
  REGION 1..11: note = short peptide
THISPNAIFKA

SEQ ID NO: 1251 - protein, 8 aa, synthetic construct
  REGION 1..8: note = short peptide
THRPVTQV

SEQ ID NO: 1252 - protein, 11 aa, synthetic construct
  REGION 1..11: note = short peptide
TGAAGKFKRGK

SEQ ID NO: 1253 - protein, 12 aa, synthetic construct
  REGION 1..12: note = short peptide
MNNHVSSKPSTM

SEQ ID NO: 1254 - protein, 12 aa, synthetic construct
  REGION 1..12: note = short peptide
SMLRLQKRLASS

SEQ ID NO: 1255 - protein, 11 aa, synthetic construct
  REGION 1..11: note = short peptide
GLMGPRGPPGA

SEQ ID NO: 1256 - protein, 8 aa, synthetic construct
  REGION 1..8: note = short peptide
QQQNPAAV

SEQ ID NO: 1257 - protein, 10 aa, synthetic construct
  REGION 1..10: note = short peptide
RSSSPVGLAK

SEQ ID NO: 1258 - protein, 14 aa, synthetic construct
  REGION 1..14: note = short peptide
GGGRGGGFGGNDNF

SEQ ID NO: 1259 - protein, 15 aa, synthetic construct
  REGION 1..15: note = short peptide
PVPEPEPEPEPEPVK

SEQ ID NO: 1260 - protein, 14 aa, synthetic construct
  REGION 1..14: note = short peptide
SDKPDMAEIEKFDK

SEQ ID NO: 1261 - protein, 11 aa, synthetic construct
  REGION 1..11: note = short peptide
ADNDEVKFKSF

SEQ ID NO: 1262 - protein, 15 aa, synthetic construct
  REGION 1..15: note = short peptide
RPPQTSQPPPPPPPM

SEQ ID NO: 1263 - protein, 9 aa, synthetic construct
  REGION 1..9: note = short peptide
HLANIVERV

SEQ ID NO: 1264 - protein, 9 aa, synthetic construct
  REGION 1..9: note = short peptide
AAAAVQGGR

SEQ ID NO: 1265 - protein, 10 aa, synthetic construct
  REGION 1..10: note = short peptide
AASAARGAAA

SEQ ID NO: 1266 - protein, 14 aa, synthetic construct
  REGION 1..14: note = short peptide
FMGPLKKDRIAKEE

SEQ ID NO: 1267 - protein, 11 aa, synthetic construct
  REGION 1..11: note = short peptide
NHLSPVQGTEA

SEQ ID NO: 1268 - protein, 12 aa, synthetic construct
  REGION 1..12: note = short peptide
SFNDTFVHVTDL

SEQ ID NO: 1269 - protein, 12 aa, synthetic construct
  REGION 1..12: note = short peptide
SESSSKSSQPLA

SEQ ID NO: 1270 - protein, 12 aa, synthetic construct
  REGION 1..12: note = short peptide
SDTSESGAGLTR

SEQ ID NO: 1271 - protein, 10 aa, synthetic construct
  REGION 1..10: note = short peptide
AEMGKGSFKY

SEQ ID NO: 1272 - protein, 10 aa, synthetic construct
  REGION 1..10: note = short peptide
TVWAHNLIAI

SEQ ID NO: 1273 - protein, 8 aa, synthetic construct
  REGION 1..8: note = short peptide
SHLHVKNA

SEQ ID NO: 1274 - protein, 9 aa, synthetic construct
  REGION 1..9: note = short peptide
HIWAVVPCI

SEQ ID NO: 1275 - protein, 15 aa, synthetic construct
  REGION 1..15: note = short peptide
AASSNSAQGSDVSLT

SEQ ID NO: 1276 - protein, 11 aa, synthetic construct
  REGION 1..11: note = short peptide
TRILVQGCHAA

SEQ ID NO: 1277 - protein, 8 aa, synthetic construct
  REGION 1..8: note = short peptide
LCQPTGGK

SEQ ID NO: 1278 - protein, 10 aa, synthetic construct
  REGION 1..10: note = short peptide
QRCPLKKESA

SEQ ID NO: 1279 - protein, 11 aa, synthetic construct
  REGION 1..11: note = short peptide
TEICDAYTKKL

SEQ ID NO: 1280 - protein, 8 aa, synthetic construct
  REGION 1..8: note = short peptide
NHYSQQMA

SEQ ID NO: 1281 - protein, 8 aa, synthetic construct
  REGION 1..8: note = short peptide
ALYPGTNY

SEQ ID NO: 1282 - protein, 9 aa, synthetic construct
  REGION 1..9: note = short peptide
SLNDCFVKV

SEQ ID NO: 1283 - protein, 10 aa, synthetic construct
  REGION 1..10: note = short peptide
MEDGTCKVTY

SEQ ID NO: 1284 - protein, 10 aa, synthetic construct
  REGION 1..10: note = short peptide
REQPWHKECF

SEQ ID NO: 1285 - protein, 10 aa, synthetic construct
  REGION 1..10: note = short peptide
EEDPGICRGY

SEQ ID NO: 1286 - protein, 9 aa, synthetic construct
  REGION 1..9: note = short peptide
ALAQGLCEV

SEQ ID NO: 1287 - protein, 11 aa, synthetic construct
  REGION 1..11: note = short peptide
ALSEAMGLFCL

SEQ ID NO: 1288 - protein, 15 aa, synthetic construct
  REGION 1..15: note = short peptide
KGAAIPAKGAKNGKN

SEQ ID NO: 1289 - protein, 8 aa, synthetic construct
  REGION 1..8: note = short peptide
QQQNPAAV

SEQ ID NO: 1290 - protein, 14 aa, synthetic construct
  REGION 1..14: note = short peptide
TVETRDGQVINETS

SEQ ID NO: 1291 - protein, 15 aa, synthetic construct
  REGION 1..15: note = short peptide
YVDDTQFVRFDSDDA

SEQ ID NO: 1292 - protein, 13 aa, synthetic construct
  REGION 1..13: note = short peptide
TSGNGPPNPRPVG

SEQ ID NO: 1293 - protein, 15 aa, synthetic construct
  REGION 1..15: note = short peptide
VGSNKGAIIGLMVGG

SEQ ID NO: 1294 - protein, 9 aa, synthetic construct
  REGION 1..9: note = short peptide
VVTNVTVKA

SEQ ID NO: 1295 - protein, 10 aa, synthetic construct
  REGION 1..10: note = short peptide
LMTVLSLFPG

SEQ ID NO: 1296 - protein, 12 aa, synthetic construct
  REGION 1..12: note = short peptide
SGGFQRGGGRGA

SEQ ID NO: 1297 - protein, 9 aa, synthetic construct
  REGION 1..9: note = short peptide
SDTGRSKGY

SEQ ID NO: 1298 - protein, 13 aa, synthetic construct
  REGION 1..13: note = short peptide
SGPYRGGYGGGGG

SEQ ID NO: 1299 - protein, 14 aa, synthetic construct
  REGION 1..14: note = short peptide
SGRGGFGGSRGGGG

SEQ ID NO: 1300 - protein, 10 aa, synthetic construct
  REGION 1..10: note = short peptide
SLADLGLDSL

SEQ ID NO: 1301 - protein, 10 aa, synthetic construct
  REGION 1..10: note = short peptide
NLAKSAEAWA

SEQ ID NO: 1302 - protein, 13 aa, synthetic construct
  REGION 1..13: note = short peptide
RSRSPLELEPEAK

SEQ ID NO: 1303 - protein, 12 aa, synthetic construct
  REGION 1..12: note = short peptide
MFSSSAKIVKPN

SEQ ID NO: 1304 - protein, 13 aa, synthetic construct
  REGION 1..13: note = short peptide
MESYHKPDQQKLQ

SEQ ID NO: 1305 - protein, 12 aa, synthetic construct
  REGION 1..12: note = short peptide
MNWNKGGPGTKR

SEQ ID NO: 1306 - protein, 13 aa, synthetic construct
  REGION 1..13: note = short peptide
MNHTVQTFFSPVN

SEQ ID NO: 1307 - protein, 8 aa, synthetic construct
  REGION 1..8: note = short peptide
THRPVTQV

SEQ ID NO: 1308 - protein, 10 aa, synthetic construct
  REGION 1..10: note = short peptide
TPSQFPPLRP

SEQ ID NO: 1309 - protein, 9 aa, synthetic construct
  REGION 1..9: note = short peptide
TNMSVLTPF

SEQ ID NO: 1310 - protein, 15 aa, synthetic construct
  REGION 1..15: note = short peptide
SRGGYGGGGPGYGNQ

SEQ ID NO: 1311 - protein, 11 aa, synthetic construct
  REGION 1..11: note = short peptide
SSYFVNPLFSK

SEQ ID NO: 1312 - protein, 15 aa, synthetic construct
  REGION 1..15: note = short peptide
FTKFNADEFEDMVAE

SEQ ID NO: 1313 - protein, 11 aa, synthetic construct
  REGION 1..11: note = short peptide
GIWGEGKDMYL

SEQ ID NO: 1314 - protein, 15 aa, synthetic construct
  REGION 1..15: note = short peptide
GGYVKLFPNSLDQTD

SEQ ID NO: 1315 - protein, 14 aa, synthetic construct
  REGION 1..14: note = short peptide
GDDDWTHLSSKEVD

SEQ ID NO: 1316 - protein, 8 aa, synthetic construct
  REGION 1..8: note = short peptide
GPSLSNFL

SEQ ID NO: 1317 - protein, 9 aa, synthetic construct
  REGION 1..9: note = short peptide
KHLNGTITA

SEQ ID NO: 1318 - protein, 9 aa, synthetic construct
  REGION 1..9: note = short peptide
KMFKGFEKV

SEQ ID NO: 1319 - protein, 9 aa, synthetic construct
  REGION 1..9: note = short peptide
KAESNSNPI

SEQ ID NO: 1320 - protein, 9 aa, synthetic construct
  REGION 1..9: note = short peptide
IPTSPTSKY

SEQ ID NO: 1321 - protein, 13 aa, synthetic construct
  REGION 1..13: note = short peptide
KGGFGSMLRALGA

SEQ ID NO: 1322 - protein, 15 aa, synthetic construct
  REGION 1..15: note = short peptide
APGEAKEPLLQDTNV

SEQ ID NO: 1323 - protein, 10 aa, synthetic construct
  REGION 1..10: note = short peptide
ALRNITAVGK

SEQ ID NO: 1324 - protein, 15 aa, synthetic construct
  REGION 1..15: note = short peptide
AQESPKNSAAEIPVT

SEQ ID NO: 1325 - protein, 13 aa, synthetic construct
  REGION 1..13: note = short peptide
ADIQTERAYQKQP

SEQ ID NO: 1326 - protein, 11 aa, synthetic construct
  REGION 1..11: note = short peptide
ADIQTERAYQK

SEQ ID NO: 1327 - protein, 9 aa, synthetic construct
  REGION 1..9: note = short peptide
ADIQTERAY

SEQ ID NO: 1328 - protein, 15 aa, synthetic construct
  REGION 1..15: note = short peptide
ADFLKGLPVYNKSNF

SEQ ID NO: 1329 - protein, 12 aa, synthetic construct
  REGION 1..12: note = short peptide
ADFDTYDDRAYS

SEQ ID NO: 1330 - protein, 12 aa, synthetic construct
  REGION 1..12: note = short peptide
AAVQAAEVKVDG

SEQ ID NO: 1331 - protein, 8 aa, synthetic construct
  REGION 1..8: note = short peptide
ADKPDMGE

SEQ ID NO: 1332 - protein, 15 aa, synthetic construct
  REGION 1..15: note = short peptide
ADKPDMGEIASFDKA

SEQ ID NO: 1333 - protein, 15 aa, synthetic construct
  REGION 1..15: note = short peptide
ADKPDMGEIASFDKA

SEQ ID NO: 1334 - protein, 11 aa, synthetic construct
  REGION 1..11: note = short peptide
AESSPTAGKKL

SEQ ID NO: 1335 - protein, 15 aa, synthetic construct
  REGION 1..15: note = short peptide
AEPSAATQSHSISSS

SEQ ID NO: 1336 - protein, 11 aa, synthetic construct
  REGION 1..11: note = short peptide
AVVSPPALHNA

SEQ ID NO: 1337 - protein, 15 aa, synthetic construct
  REGION 1..15: note = short peptide
ERDALNIETAIKTKG

SEQ ID NO: 1338 - protein, 10 aa, synthetic construct
  REGION 1..10: note = short peptide
FESNAIMKKY

SEQ ID NO: 1339 - protein, 8 aa, synthetic construct
  REGION 1..8: note = short peptide
FKMPDMHF

SEQ ID NO: 1340 - protein, 10 aa, synthetic construct
  REGION 1..10: note = short peptide
DQVAEIVSKY

SEQ ID NO: 1341 - protein, 15 aa, synthetic construct
  REGION 1..15: note = short peptide
DKPDMGEIASFDKAK

SEQ ID NO: 1342 - protein, 8 aa, synthetic construct
  REGION 1..8: note = short peptide
DHGCSLPA

SEQ ID NO: 1343 - protein, 15 aa, synthetic construct
  REGION 1..15: note = short peptide
KPAERTQATLLTTWL

SEQ ID NO: 1344 - protein, 10 aa, synthetic construct
  REGION 1..10: note = short peptide
KQLATKAARK

SEQ ID NO: 1345 - protein, 13 aa, synthetic construct
  REGION 1..13: note = short peptide
KRTKKVGIVGKYG

SEQ ID NO: 1346 - protein, 11 aa, synthetic construct
  REGION 1..11: note = short peptide
YLWSPAGCMSV

SEQ ID NO: 1347 - protein, 11 aa, synthetic construct
  REGION 1..11: note = short peptide
CLQRVTEARHK

SEQ ID NO: 1348 - protein, 12 aa, synthetic construct
  REGION 1..12: note = short peptide
KLLDHTGGCMYI

SEQ ID NO: 1349 - protein, 9 aa, synthetic construct
  REGION 1..9: note = short peptide
SQACPLSEK

SEQ ID NO: 1350 - protein, 9 aa, synthetic construct
  REGION 1..9: note = short peptide
MLFPGCISL

SEQ ID NO: 1351 - protein, 10 aa, synthetic construct
  REGION 1..10: note = short peptide
RICANKYMVK

SEQ ID NO: 1352 - protein, 9 aa, synthetic construct
  REGION 1..9: note = short peptide
FLVMGVCEV

SEQ ID NO: 1353 - protein, 9 aa, synthetic construct
  REGION 1..9: note = short peptide
SESCLFRFF

SEQ ID NO: 1354 - protein, 11 aa, synthetic construct
  REGION 1..11: note = short peptide
ERLSAPGCWAA

SEQ ID NO: 1355 - protein, 10 aa, synthetic construct
  REGION 1..10: note = short peptide
DFCKSKDIVL

SEQ ID NO: 1356 - protein, 14 aa, synthetic construct
  REGION 1..14: note = short peptide
VLMPYCKSLDIFTV

SEQ ID NO: 1357 - protein, 9 aa, synthetic construct
  REGION 1..9: note = short peptide
AEDCSVHNF

SEQ ID NO: 1358 - protein, 12 aa, synthetic construct
  REGION 1..12: note = short peptide
AEGCGGSKEHSF

SEQ ID NO: 1359 - protein, 11 aa, synthetic construct
  REGION 1..11: note = short peptide
VRKENQWCEEK

SEQ ID NO: 1360 - protein, 10 aa, synthetic construct
  REGION 1..10: note = short peptide
RVGTHGGCLK

SEQ ID NO: 1361 - protein, 15 aa, synthetic construct
  REGION 1..15: note = short peptide
VGSNKGAIIGLMVGG

SEQ ID NO: 1362 - protein, 10 aa, synthetic construct
  REGION 1..10: note = short peptide
NLAKSAEAWA

SEQ ID NO: 1363 - protein, 9 aa, synthetic construct
  REGION 1..9: note = short peptide
TNMSVLTPF

SEQ ID NO: 1364 - protein, 15 aa, synthetic construct
  REGION 1..15: note = short peptide
KPAERTQATLLTTWL

SEQ ID NO: 1365 - protein, 15 aa, synthetic construct
  REGION 1..15: note = short peptide
GYVKLFPNSLDQTDM

SEQ ID NO: 1366 - protein, 9 aa, synthetic construct
  REGION 1..9: note = short peptide
HGYENPTYK

SEQ ID NO: 1367 - protein, 11 aa, synthetic construct
  REGION 1..11: note = short peptide
TLRQAPAGLPR

SEQ ID NO: 1368 - protein, 10 aa, synthetic construct
  REGION 1..10: note = short peptide
RSNNGIIHAA

SEQ ID NO: 1369 - protein, 14 aa, synthetic construct
  REGION 1..14: note = short peptide
RSRSPLELEPEAKK

SEQ ID NO: 1370 - protein, 14 aa, synthetic construct
  REGION 1..14: note = short peptide
RSRSPLELEPEAKK

SEQ ID NO: 1371 - protein, 10 aa, synthetic construct
  REGION 1..10: note = short peptide
RQYDKFLTHF

SEQ ID NO: 1372 - protein, 14 aa, synthetic construct
  REGION 1..14: note = short peptide
GTCGQPADKASASG

SEQ ID NO: 1373 - protein, 12 aa, synthetic construct
  REGION 1..12: note = short peptide
RAGYGAGVGGGY

SEQ ID NO: 1374 - protein, 14 aa, synthetic construct
  REGION 1..14: note = short peptide
IGNSTAIQELFKRI

SEQ ID NO: 1375 - protein, 15 aa, synthetic construct
  REGION 1..15: note = short peptide
QPECSPEAPPAEAAE

SEQ ID NO: 1376 - protein, 8 aa, synthetic construct
  REGION 1..8: note = short peptide
IAGFLQKN

SEQ ID NO: 1377 - protein, 15 aa, synthetic construct
  REGION 1..15: note = short peptide
HHLGKSIPTDNQIKA

SEQ ID NO: 1378 - protein, 13 aa, synthetic construct
  REGION 1..13: note = short peptide
ATLKDQLIYNLLK

SEQ ID NO: 1379 - protein, 9 aa, synthetic construct
  REGION 1..9: note = short peptide
HLNGTITAK

SEQ ID NO: 1380 - protein, 14 aa, synthetic construct
  REGION 1..14: note = short peptide
HPVTVPTYRAPGTP

SEQ ID NO: 1381 - protein, 12 aa, synthetic construct
  REGION 1..12: note = short peptide
ASNDYTQQATQS

SEQ ID NO: 1382 - protein, 13 aa, synthetic construct
  REGION 1..13: note = short peptide
FGIFVEGVEPGSK

SEQ ID NO: 1383 - protein, 15 aa, synthetic construct
  REGION 1..15: note = short peptide
KRAKEAAEQDVEKKK

SEQ ID NO: 1384 - protein, 12 aa, synthetic construct
  REGION 1..12: note = short peptide
SHVAVENALGLD

SEQ ID NO: 1385 - protein, 11 aa, synthetic construct
  REGION 1..11: note = short peptide
SHQTGVYPCSL

SEQ ID NO: 1386 - protein, 9 aa, synthetic construct
  REGION 1..9: note = short peptide
DSSEEKFLR

SEQ ID NO: 1387 - protein, 15 aa, synthetic construct
  REGION 1..15: note = short peptide
EKKQPVDLGLLEEDD

SEQ ID NO: 1388 - protein, 15 aa, synthetic construct
  REGION 1..15: note = short peptide
SQATNYGEDLTKNHD

SEQ ID NO: 1389 - protein, 13 aa, synthetic construct
  REGION 1..13: note = short peptide
KRTKKVGIVGKYG

SEQ ID NO: 1390 - protein, 14 aa, synthetic construct
  REGION 1..14: note = short peptide
SSNLGNFNYEQRGA

SEQ ID NO: 1391 - protein, 13 aa, synthetic construct
  REGION 1..13: note = short peptide
SNLGNFNYEQRGA

SEQ ID NO: 1392 - protein, 15 aa, synthetic construct
  REGION 1..15: note = short peptide
EDDDVDTKKQKTDED

SEQ ID NO: 1393 - protein, 13 aa, synthetic construct
  REGION 1..13: note = short peptide
SRSPLELEPEAKK

SEQ ID NO: 1394 - protein, 13 aa, synthetic construct
  REGION 1..13: note = short peptide
SRSPLELEPEAKK

SEQ ID NO: 1395 - protein, 10 aa, synthetic construct
  REGION 1..10: note = short peptide
SPLSGGNVAF

SEQ ID NO: 1396 - protein, 10 aa, synthetic construct
  REGION 1..10: note = short peptide
EEDPGICRGY

SEQ ID NO: 1397 - protein, 10 aa, synthetic construct
  REGION 1..10: note = short peptide
ERPGAAHQAG

SEQ ID NO: 1398 - protein, 8 aa, synthetic construct
  REGION 1..8: note = short peptide
FPHLGSGR

SEQ ID NO: 1399 - protein, 9 aa, synthetic construct
  REGION 1..9: note = short peptide
GIILFELCV

SEQ ID NO: 1400 - protein, 15 aa, synthetic construct
  REGION 1..15: note = short peptide
SDDAGDTLATGDKAE

SEQ ID NO: 1401 - protein, 15 aa, synthetic construct
  REGION 1..15: note = short peptide
TDEEEETAKESTAEK

SEQ ID NO: 1402 - protein, 11 aa, synthetic construct
  REGION 1..11: note = short peptide
GMNASSSRFFL

SEQ ID NO: 1403 - protein, 8 aa, synthetic construct
  REGION 1..8: note = short peptide
SGKVTFPK

SEQ ID NO: 1404 - protein, 12 aa, synthetic construct
  REGION 1..12: note = short peptide
SGGYRGSGGFQR

SEQ ID NO: 1405 - protein, 13 aa, synthetic construct
  REGION 1..13: note = short peptide
SGGKYVDSEGHLY

SEQ ID NO: 1406 - protein, 10 aa, synthetic construct
  REGION 1..10: note = short peptide
DRDEDKAKAY

SEQ ID NO: 1407 - protein, 15 aa, synthetic construct
  REGION 1..15: note = short peptide
SGDHLHNDSQIEADF

SEQ ID NO: 1408 - protein, 10 aa, synthetic construct
  REGION 1..10: note = short peptide
SVRYSSSKHY

SEQ ID NO: 1409 - protein, 13 aa, synthetic construct
  REGION 1..13: note = short peptide
SVRYSSSKHYSSS

SEQ ID NO: 1410 - protein, 11 aa, synthetic construct
  REGION 1..11: note = short peptide
SGREGGKKKPL

SEQ ID NO: 1411 - protein, 9 aa, synthetic construct
  REGION 1..9: note = short peptide
FPTSKISSV

SEQ ID NO: 1412 - protein, 13 aa, synthetic construct
  REGION 1..13: note = short peptide
SFDPNLLHNNGHN

SEQ ID NO: 1413 - protein, 13 aa, synthetic construct
  REGION 1..13: note = short peptide
GDSHVDTSSTVSE

SEQ ID NO: 1414 - protein, 12 aa, synthetic construct
  REGION 1..12: note = short peptide
SDKPDMAEIEKF

SEQ ID NO: 1415 - protein, 10 aa, synthetic construct
  REGION 1..10: note = short peptide
TAMTPQPAGP

SEQ ID NO: 1416 - protein, 10 aa, synthetic construct
  REGION 1..10: note = short peptide
TVDAKTETAV

SEQ ID NO: 1417 - protein, 14 aa, synthetic construct
  REGION 1..14: note = short peptide
ADFLKGLPVYNKSN

SEQ ID NO: 1418 - protein, 13 aa, synthetic construct
  REGION 1..13: note = short peptide
LFPQYKFRELFNK

SEQ ID NO: 1419 - protein, 11 aa, synthetic construct
  REGION 1..11: note = short peptide
ADAEMEKHKKF

SEQ ID NO: 1420 - protein, 15 aa, synthetic construct
  REGION 1..15: note = short peptide
AKPEPVIEEVDLANL

SEQ ID NO: 1421 - protein, 13 aa, synthetic construct
  REGION 1..13: note = short peptide
ADDAGAAGGPGGP

SEQ ID NO: 1422 - protein, 14 aa, synthetic construct
  REGION 1..14: note = short peptide
AKEGVEKAEETEQM

SEQ ID NO: 1423 - protein, 12 aa, synthetic construct
  REGION 1..12: note = short peptide
ADISLDELIRKR

SEQ ID NO: 1424 - protein, 15 aa, synthetic construct
  REGION 1..15: note = short peptide
AGRKLALKTIDWVAF

SEQ ID NO: 1425 - protein, 11 aa, synthetic construct
  REGION 1..11: note = short peptide
AASAARGAAAL

SEQ ID NO: 1426 - protein, 13 aa, synthetic construct
  REGION 1..13: note = short peptide
ALHVPKAPGFAQM

SEQ ID NO: 1427 - protein, 14 aa, synthetic construct
  REGION 1..14: note = short peptide
KEADLAAQEEAAKK

SEQ ID NO: 1428 - protein, 11 aa, synthetic construct
  REGION 1..11: note = short peptide
AKYLAQIIVMG

SEQ ID NO: 1429 - protein, 11 aa, synthetic construct
  REGION 1..11: note = short peptide
MVADPPRDSKG

SEQ ID NO: 1430 - protein, 11 aa, synthetic construct
  REGION 1..11: note = short peptide
NEIGTGGTCQW

SEQ ID NO: 1431 - protein, 9 aa, synthetic construct
  REGION 1..9: note = short peptide
VLCPPPVKK

SEQ ID NO: 1432 - protein, 13 aa, synthetic construct
  REGION 1..13: note = short peptide
AEPSAATQSHSIS

SEQ ID NO: 1433 - protein, 15 aa, synthetic construct
  REGION 1..15: note = short peptide
AELRVLVAVKRVIDY

SEQ ID NO: 1434 - protein, 10 aa, synthetic construct
  REGION 1..10: note = short peptide
KINFVGGNKL

SEQ ID NO: 1435 - protein, 13 aa, synthetic construct
  REGION 1..13: note = short peptide
MNNHVSSKPSTMK

SEQ ID NO: 1436 - protein, 9 aa, synthetic construct
  REGION 1..9: note = short peptide
KHLLNGDNM

SEQ ID NO: 1437 - protein, 8 aa, synthetic construct
  REGION 1..8: note = short peptide
KGLLTAVV

SEQ ID NO: 1438 - protein, 13 aa, synthetic construct
  REGION 1..13: note = short peptide
MESAIAEGGASRF

SEQ ID NO: 1439 - protein, 13 aa, synthetic construct
  REGION 1..13: note = short peptide
ADKPDMGEIASFD

SEQ ID NO: 1440 - protein, 11 aa, synthetic construct
  REGION 1..11: note = short peptide
AFANLRKVLIS

SEQ ID NO: 1441 - protein, 14 aa, synthetic construct
  REGION 1..14: note = short peptide
AETAAGVGRFKTNY

SEQ ID NO: 1442 - protein, 11 aa, synthetic construct
  REGION 1..11: note = short peptide
AESSPTAGKKL

SEQ ID NO: 1443 - protein, 10 aa, synthetic construct
  REGION 1..10: note = short peptide
MIWDCTCIGA

SEQ ID NO: 1444 - protein, 13 aa, synthetic construct
  REGION 1..13: note = short peptide
YGDWQPPPPPMPP

SEQ ID NO: 1445 - protein, 8 aa, synthetic construct
  REGION 1..8: note = short peptide
MGKGSFKY

SEQ ID NO: 1446 - protein, 15 aa, synthetic construct
  REGION 1..15: note = short peptide
VRKPVVSTISKGGYL

SEQ ID NO: 1447 - protein, 9 aa, synthetic construct
  REGION 1..9: note = short peptide
KLDSVNKDL

SEQ ID NO: 1448 - protein, 9 aa, synthetic construct
  REGION 1..9: note = short peptide
MFNDTLELF

SEQ ID NO: 1449 - protein, 14 aa, synthetic construct
  REGION 1..14: note = short peptide
MFSEQAAQRAHTLL

SEQ ID NO: 1450 - protein, 9 aa, synthetic construct
  REGION 1..9: note = short peptide
LHHAKWSQA

SEQ ID NO: 1451 - protein, 12 aa, synthetic construct
  REGION 1..12: note = short peptide
PAGVPMSTYLKM

SEQ ID NO: 1452 - protein, 12 aa, synthetic construct
  REGION 1..12: note = short peptide
AAAQEADGARSA

SEQ ID NO: 1453 - protein, 15 aa, synthetic construct
  REGION 1..15: note = short peptide
PDMAEIEKFDKSKLK

SEQ ID NO: 1454 - protein, 15 aa, synthetic construct
  REGION 1..15: note = short peptide
AAAAVVEFQRAQSLL

SEQ ID NO: 1455 - protein, 9 aa, synthetic construct
  REGION 1..9: note = short peptide
IILNGSVMV

SEQ ID NO: 1456 - protein, 9 aa, synthetic construct
  REGION 1..9: note = short peptide
NVADILTKH

SEQ ID NO: 1457 - protein, 15 aa, synthetic construct
  REGION 1..15: note = short peptide
KNLKVPSGQNADVQK

SEQ ID NO: 1458 - protein, 14 aa, synthetic construct
  REGION 1..14: note = short peptide
YYGQGGMSGGGWRG

SEQ ID NO: 1459 - protein, 10 aa, synthetic construct
  REGION 1..10: note = short peptide
REICPAGHGY

SEQ ID NO: 1460 - protein, 10 aa, synthetic construct
  REGION 1..10: note = short peptide
ALFKCKFEEA

SEQ ID NO: 1461 - protein, 11 aa, synthetic construct
  REGION 1..11: note = short peptide
RMCEDLWRWQK

SEQ ID NO: 1462 - protein, 12 aa, synthetic construct
  REGION 1..12: note = short peptide
RLWDCETGKQLA

SEQ ID NO: 1463 - protein, 10 aa, synthetic construct
  REGION 1..10: note = short peptide
ADCPISGHMW

SEQ ID NO: 1464 - protein, 9 aa, synthetic construct
  REGION 1..9: note = short peptide
SMYSKPECL

SEQ ID NO: 1465 - protein, 8 aa, synthetic construct
  REGION 1..8: note = short peptide
MHLRLFCI

SEQ ID NO: 1466 - protein, 8 aa, synthetic construct
  REGION 1..8: note = short peptide
MHLRLFCI

SEQ ID NO: 1467 - protein, 9 aa, synthetic construct
  REGION 1..9: note = short peptide
SLDDSCSQL

SEQ ID NO: 1468 - protein, 11 aa, synthetic construct
  REGION 1..11: note = short peptide
SERPACVKKDY

SEQ ID NO: 1469 - protein, 8 aa, synthetic construct
  REGION 1..8: note = short peptide
TRFHIHCA

SEQ ID NO: 1470 - protein, 9 aa, synthetic construct
  REGION 1..9: note = short peptide
HLLAILFCA

SEQ ID NO: 1471 - protein, 9 aa, synthetic construct
  REGION 1..9: note = short peptide
IQAPDVYCV

SEQ ID NO: 1472 - protein, 8 aa, synthetic construct
  REGION 1..8: note = short peptide
YIDGPHCV

SEQ ID NO: 1473 - protein, 9 aa, synthetic construct
  REGION 1..9: note = short peptide
VLVEGKICV

SEQ ID NO: 1474 - protein, 9 aa, synthetic construct
  REGION 1..9: note = short peptide
KMVDGVGVC

SEQ ID NO: 1475 - protein, 11 aa, synthetic construct
  REGION 1..11: note = short peptide
VTCTYSPALNK

SEQ ID NO: 1476 - protein, 8 aa, synthetic construct
  REGION 1..8: note = short peptide
CIYGGAPK

SEQ ID NO: 1477 - protein, 12 aa, synthetic construct
  REGION 1..12: note = short peptide
ALMEDGRCQVLL

SEQ ID NO: 1478 - protein, 8 aa, synthetic construct
  REGION 1..8: note = short peptide
AVNGAAGF

SEQ ID NO: 1479 - protein, 10 aa, synthetic construct
  REGION 1..10: note = short peptide
WMSETGIIDV

SEQ ID NO: 1480 - protein, 9 aa, synthetic construct
  REGION 1..9: note = short peptide
THFLTGVCA

SEQ ID NO: 1481 - protein, 9 aa, synthetic construct
  REGION 1..9: note = short peptide
SLNDCFVKV

SEQ ID NO: 1482 - protein, 10 aa, synthetic construct
  REGION 1..10: note = short peptide
QENYAGIFHF

SEQ ID NO: 1483 - protein, 15 aa, synthetic construct
  REGION 1..15: note = short peptide
DGEDQTQDTELVETR

SEQ ID NO: 1484 - protein, 9 aa, synthetic construct
  REGION 1..9: note = short peptide
IVDDCGGAF

SEQ ID NO: 1485 - protein, 10 aa, synthetic construct
  REGION 1..10: note = short peptide
MEDGTCKVTY

SEQ ID NO: 1486 - protein, 8 aa, synthetic construct
  REGION 1..8: note = short peptide
ALWTVQEA

SEQ ID NO: 1487 - protein, 9 aa, synthetic construct
  REGION 1..9: note = short peptide
GLPHGFCTV

SEQ ID NO: 1488 - protein, 10 aa, synthetic construct
  REGION 1..10: note = short peptide
RSNNGIIHAA

SEQ ID NO: 1489 - protein, 15 aa, synthetic construct
  REGION 1..15: note = short peptide
QPECSPEAPPAEAAE

SEQ ID NO: 1490 - protein, 8 aa, synthetic construct
  REGION 1..8: note = short peptide
IAGFLQKN

SEQ ID NO: 1491 - protein, 15 aa, synthetic construct
  REGION 1..15: note = short peptide
SQATNYGEDLTKNHD

SEQ ID NO: 1492 - protein, 15 aa, synthetic construct
  REGION 1..15: note = short peptide
EDDDVDTKKQKTDED

SEQ ID NO: 1493 - protein, 10 aa, synthetic construct
  REGION 1..10: note = short peptide
EEDPGICRGY

SEQ ID NO: 1494 - protein, 11 aa, synthetic construct
  REGION 1..11: note = short peptide
NEIGTGGTCQW

SEQ ID NO: 1495 - protein, 9 aa, synthetic construct
  REGION 1..9: note = short peptide
KLDSVNKDL

SEQ ID NO: 1496 - protein, 9 aa, synthetic construct
  REGION 1..9: note = short peptide
LHHAKWSQA

SEQ ID NO: 1497 - protein, 13 aa, synthetic construct
  REGION 1..13: note = short peptide
YGGGRGGYGGGGP

SEQ ID NO: 1498 - protein, 13 aa, synthetic construct
  REGION 1..13: note = short peptide
SRGGGDQGYGSGR

SEQ ID NO: 1499 - protein, 15 aa, synthetic construct
  REGION 1..15: note = short peptide
TAAPPGLPPAAAGPG

SEQ ID NO: 1500 - protein, 15 aa, synthetic construct
  REGION 1..15: note = short peptide
AEGDEAARGQQPHQG

SEQ ID NO: 1501 - protein, 14 aa, synthetic construct
  REGION 1..14: note = short peptide
SRGGYGGDRGGGSG

SEQ ID NO: 1502 - protein, 12 aa, synthetic construct
  REGION 1..12: note = short peptide
ADNEKLDNQRLK

SEQ ID NO: 1503 - protein, 9 aa, synthetic construct
  REGION 1..9: note = short peptide
YCAEIAHNV

SEQ ID NO: 1504 - protein, 13 aa, synthetic construct
  REGION 1..13: note = short peptide
ADVVVGKDKGGEQ

SEQ ID NO: 1505 - protein, 14 aa, synthetic construct
  REGION 1..14: note = short peptide
ADVVVGKDKGGEQR

SEQ ID NO: 1506 - protein, 9 aa, synthetic construct
  REGION 1..9: note = short peptide
SVDISPTRL

SEQ ID NO: 1507 - protein, 10 aa, synthetic construct
  REGION 1..10: note = short peptide
SVAGLKKQFY

SEQ ID NO: 1508 - protein, 11 aa, synthetic construct
  REGION 1..11: note = short peptide
AARQAVGSGAQ

SEQ ID NO: 1509 - protein, 11 aa, synthetic construct
  REGION 1..11: note = short peptide
SVRYSSSKHYS

SEQ ID NO: 1510 - protein, 13 aa, synthetic construct
  REGION 1..13: note = short peptide
ADKPDMGEIASFD

SEQ ID NO: 1511 - protein, 11 aa, synthetic construct
  REGION 1..11: note = short peptide
ADKPDMGEIAS

SEQ ID NO: 1512 - protein, 13 aa, synthetic construct
  REGION 1..13: note = short peptide
SVPSALMKQPPIQ

SEQ ID NO: 1513 - protein, 12 aa, synthetic construct
  REGION 1..12: note = short peptide
SVRYSSSKHYSS

SEQ ID NO: 1514 - protein, 13 aa, synthetic construct
  REGION 1..13: note = short peptide
ADKPDMGEIASFD

SEQ ID NO: 1515 - protein, 14 aa, synthetic construct
  REGION 1..14: note = short peptide
SVRYSSSKHYSSSR

SEQ ID NO: 1516 - protein, 9 aa, synthetic construct
  REGION 1..9: note = short peptide
YLSVKVWDL

SEQ ID NO: 1517 - protein, 15 aa, synthetic construct
  REGION 1..15: note = short peptide
EDDDVDTKKQKTDED

SEQ ID NO: 1518 - protein, 12 aa, synthetic construct
  REGION 1..12: note = short peptide
TPLTSMVVTKPD

SEQ ID NO: 1519 - protein, 15 aa, synthetic construct
  REGION 1..15: note = short peptide
APGEAKEPLLQDTNV

SEQ ID NO: 1520 - protein, 14 aa, synthetic construct
  REGION 1..14: note = short peptide
ASNDYTQQATQSYG

SEQ ID NO: 1521 - protein, 15 aa, synthetic construct
  REGION 1..15: note = short peptide
ASNDYTQQATQSYGA

SEQ ID NO: 1522 - protein, 15 aa, synthetic construct
  REGION 1..15: note = short peptide
ASQSQGIQQLLQAEK

SEQ ID NO: 1523 - protein, 13 aa, synthetic construct
  REGION 1..13: note = short peptide
ASSDIQVKELEKR

SEQ ID NO: 1524 - protein, 14 aa, synthetic construct
  REGION 1..14: note = short peptide
ATNFLAHEKIWFDK

SEQ ID NO: 1525 - protein, 15 aa, synthetic construct
  REGION 1..15: note = short peptide
ATNFLAHEKIWFDKF

SEQ ID NO: 1526 - protein, 13 aa, synthetic construct
  REGION 1..13: note = short peptide
ATVTATTKVPEIR

SEQ ID NO: 1527 - protein, 12 aa, synthetic construct
  REGION 1..12: note = short peptide
ATNFLAHEKIWF

SEQ ID NO: 1528 - protein, 9 aa, synthetic construct
  REGION 1..9: note = short peptide
TMGPRPAAA

SEQ ID NO: 1529 - protein, 11 aa, synthetic construct
  REGION 1..11: note = short peptide
AMVSEFLKQAW

SEQ ID NO: 1530 - protein, 9 aa, synthetic construct
  REGION 1..9: note = short peptide
TVNNRTMHY

SEQ ID NO: 1531 - protein, 13 aa, synthetic construct
  REGION 1..13: note = short peptide
AQILPIRFQEHLQ

SEQ ID NO: 1532 - protein, 12 aa, synthetic construct
  REGION 1..12: note = short peptide
TTAAPSLPAAPA

SEQ ID NO: 1533 - protein, 12 aa, synthetic construct
  REGION 1..12: note = short peptide
ASASARGNQDKD

SEQ ID NO: 1534 - protein, 15 aa, synthetic construct
  REGION 1..15: note = short peptide
TYGKASRGGGNHQNN

SEQ ID NO: 1535 - protein, 14 aa, synthetic construct
  REGION 1..14: note = short peptide
AERQEEQRGSPPLR

SEQ ID NO: 1536 - protein, 13 aa, synthetic construct
  REGION 1..13: note = short peptide
AEQVALSRTQVCG

SEQ ID NO: 1537 - protein, 11 aa, synthetic construct
  REGION 1..11: note = short peptide
AETEERSLDNF

SEQ ID NO: 1538 - protein, 11 aa, synthetic construct
  REGION 1..11: note = short peptide
AEVEETLKRLQ

SEQ ID NO: 1539 - protein, 11 aa, synthetic construct
  REGION 1..11: note = short peptide
AEKCSQSNNQF

SEQ ID NO: 1540 - protein, 15 aa, synthetic construct
  REGION 1..15: note = short peptide
TAGAASLTKWIQKNP

SEQ ID NO: 1541 - protein, 13 aa, synthetic construct
  REGION 1..13: note = short peptide
AELNSTTEELHKY

SEQ ID NO: 1542 - protein, 14 aa, synthetic construct
  REGION 1..14: note = short peptide
AEPSAATQSHSISS

SEQ ID NO: 1543 - protein, 11 aa, synthetic construct
  REGION 1..11: note = short peptide
TGAPAQADSRG

SEQ ID NO: 1544 - protein, 12 aa, synthetic construct
  REGION 1..12: note = short peptide
AKEGVEKAEETE

SEQ ID NO: 1545 - protein, 11 aa, synthetic construct
  REGION 1..11: note = short peptide
KTYQVTPMTPR

SEQ ID NO: 1546 - protein, 10 aa, synthetic construct
  REGION 1..10: note = short peptide
VLNGKLFVCG

SEQ ID NO: 1547 - protein, 12 aa, synthetic construct
  REGION 1..12: note = short peptide
AGIELERCQQQA

SEQ ID NO: 1548 - protein, 14 aa, synthetic construct
  REGION 1..14: note = short peptide
AGELTPEEEAQYKK

SEQ ID NO: 1549 - protein, 13 aa, synthetic construct
  REGION 1..13: note = short peptide
AGELTPEEEAQYK

SEQ ID NO: 1550 - protein, 8 aa, synthetic construct
  REGION 1..8: note = short peptide
TGGHGGHP

SEQ ID NO: 1551 - protein, 10 aa, synthetic construct
  REGION 1..10: note = short peptide
VPCPARWQYK

SEQ ID NO: 1552 - protein, 13 aa, synthetic construct
  REGION 1..13: note = short peptide
AGSGVRQATSTAS

SEQ ID NO: 1553 - protein, 12 aa, synthetic construct
  REGION 1..12: note = short peptide
AGRKLALKTIDW

SEQ ID NO: 1554 - protein, 15 aa, synthetic construct
  REGION 1..15: note = short peptide
NSQTKPGGLFGTSSF

SEQ ID NO: 1555 - protein, 14 aa, synthetic construct
  REGION 1..14: note = short peptide
ISVHVGQAGVQIGN

SEQ ID NO: 1556 - protein, 10 aa, synthetic construct
  REGION 1..10: note = short peptide
LDSYRNYAEP

SEQ ID NO: 1557 - protein, 10 aa, synthetic construct
  REGION 1..10: note = short peptide
MVKLAKAGKN

SEQ ID NO: 1558 - protein, 13 aa, synthetic construct
  REGION 1..13: note = short peptide
MVKLAKAGKNQGD

SEQ ID NO: 1559 - protein, 9 aa, synthetic construct
  REGION 1..9: note = short peptide
MQAHELFRY

SEQ ID NO: 1560 - protein, 9 aa, synthetic construct
  REGION 1..9: note = short peptide
KDTKMGTPK

SEQ ID NO: 1561 - protein, 9 aa, synthetic construct
  REGION 1..9: note = short peptide
NLAKCIVSV

SEQ ID NO: 1562 - protein, 12 aa, synthetic construct
  REGION 1..12: note = short peptide
NHHGSAQEQSRD

SEQ ID NO: 1563 - protein, 11 aa, synthetic construct
  REGION 1..11: note = short peptide
HTGKIKTIKIF

SEQ ID NO: 1564 - protein, 14 aa, synthetic construct
  REGION 1..14: note = short peptide
QKLSELDDRADALQ

SEQ ID NO: 1565 - protein, 15 aa, synthetic construct
  REGION 1..15: note = short peptide
QPECSPEAPPAEAAE

SEQ ID NO: 1566 - protein, 12 aa, synthetic construct
  REGION 1..12: note = short peptide
ILYSDDGQKWTV

SEQ ID NO: 1567 - protein, 15 aa, synthetic construct
  REGION 1..15: note = short peptide
PISSGSSASSVTVTR

SEQ ID NO: 1568 - protein, 11 aa, synthetic construct
  REGION 1..11: note = short peptide
QEFFVDIGPVC

SEQ ID NO: 1569 - protein, 12 aa, synthetic construct
  REGION 1..12: note = short peptide
KLLDGDQDFSDG

SEQ ID NO: 1570 - protein, 12 aa, synthetic construct
  REGION 1..12: note = short peptide
AAAAAGTATSQR

SEQ ID NO: 1571 - protein, 14 aa, synthetic construct
  REGION 1..14: note = short peptide
MDELQDVQLTEIKP

SEQ ID NO: 1572 - protein, 13 aa, synthetic construct
  REGION 1..13: note = short peptide
MDGSGEQPRGGGP

SEQ ID NO: 1573 - protein, 9 aa, synthetic construct
  REGION 1..9: note = short peptide
KLHTGVKPH

SEQ ID NO: 1574 - protein, 9 aa, synthetic construct
  REGION 1..9: note = short peptide
MKFAEHLSA

SEQ ID NO: 1575 - protein, 11 aa, synthetic construct
  REGION 1..11: note = short peptide
KKTATAVAHCK

SEQ ID NO: 1576 - protein, 15 aa, synthetic construct
  REGION 1..15: note = short peptide
MKTVQKKCEKLQKNK

SEQ ID NO: 1577 - protein, 9 aa, synthetic construct
  REGION 1..9: note = short peptide
MLSPQRVAA

SEQ ID NO: 1578 - protein, 15 aa, synthetic construct
  REGION 1..15: note = short peptide
MERAVQGTDGGGGSN

SEQ ID NO: 1579 - protein, 14 aa, synthetic construct
  REGION 1..14: note = short peptide
MESAIAEGGASRFS

SEQ ID NO: 1580 - protein, 15 aa, synthetic construct
  REGION 1..15: note = short peptide
MESAIAEGGASRFSA

SEQ ID NO: 1581 - protein, 10 aa, synthetic construct
  REGION 1..10: note = short peptide
LLLLLLLLLL

SEQ ID NO: 1582 - protein, 9 aa, synthetic construct
  REGION 1..9: note = short peptide
KNEKEAPSL

SEQ ID NO: 1583 - protein, 9 aa, synthetic construct
  REGION 1..9: note = short peptide
LLNSPTVAK

SEQ ID NO: 1584 - protein, 11 aa, synthetic construct
  REGION 1..11: note = short peptide
KMDDPDYWRTV

SEQ ID NO: 1585 - protein, 15 aa, synthetic construct
  REGION 1..15: note = short peptide
LRFFSLLSGSLNSHG

SEQ ID NO: 1586 - protein, 9 aa, synthetic construct
  REGION 1..9: note = short peptide
KGLNAYLEK

SEQ ID NO: 1587 - protein, 9 aa, synthetic construct
  REGION 1..9: note = short peptide
MPADTNKAF

SEQ ID NO: 1588 - protein, 9 aa, synthetic construct
  REGION 1..9: note = short peptide
MNGHISNHP

SEQ ID NO: 1589 - protein, 15 aa, synthetic construct
  REGION 1..15: note = short peptide
KHPPENIIDGNPETF

SEQ ID NO: 1590 - protein, 10 aa, synthetic construct
  REGION 1..10: note = short peptide
LHYDPNKRIS

SEQ ID NO: 1591 - protein, 15 aa, synthetic construct
  REGION 1..15: note = short peptide
SGRGKGGKGLGKGGA

SEQ ID NO: 1592 - protein, 12 aa, synthetic construct
  REGION 1..12: note = short peptide
SGAPPMPGGPHS

SEQ ID NO: 1593 - protein, 15 aa, synthetic construct
  REGION 1..15: note = short peptide
SGSSSVAAMKKVVQQ

SEQ ID NO: 1594 - protein, 14 aa, synthetic construct
  REGION 1..14: note = short peptide
SHYEEGPGKNLPFS

SEQ ID NO: 1595 - protein, 13 aa, synthetic construct
  REGION 1..13: note = short peptide
SDDAGDTLATGDK

SEQ ID NO: 1596 - protein, 14 aa, synthetic construct
  REGION 1..14: note = short peptide
SDDAGDTLATGDKA

SEQ ID NO: 1597 - protein, 10 aa, synthetic construct
  REGION 1..10: note = short peptide
GGGRGGLHDF

SEQ ID NO: 1598 - protein, 8 aa, synthetic construct
  REGION 1..8: note = short peptide
GHLSHPAA

SEQ ID NO: 1599 - protein, 10 aa, synthetic construct
  REGION 1..10: note = short peptide
SEKTNRTLSY

SEQ ID NO: 1600 - protein, 11 aa, synthetic construct
  REGION 1..11: note = short peptide
SEQGSPNVHNY

SEQ ID NO: 1601 - protein, 13 aa, synthetic construct
  REGION 1..13: note = short peptide
SDKPDMAEIEKFD

SEQ ID NO: 1602 - protein, 15 aa, synthetic construct
  REGION 1..15: note = short peptide
SDKPDMAEIEKFDKS

SEQ ID NO: 1603 - protein, 15 aa, synthetic construct
  REGION 1..15: note = short peptide
SKGPAVGIDLGTTYS

SEQ ID NO: 1604 - protein, 15 aa, synthetic construct
  REGION 1..15: note = short peptide
SPGERHGSRHQQSAD

SEQ ID NO: 1605 - protein, 11 aa, synthetic construct
  REGION 1..11: note = short peptide
SNYGPMKSGNF

SEQ ID NO: 1606 - protein, 15 aa, synthetic construct
  REGION 1..15: note = short peptide
SNSGPYRGGYGGGGG

SEQ ID NO: 1607 - protein, 13 aa, synthetic construct
  REGION 1..13: note = short peptide
SQPVMRPPNPFGP

SEQ ID NO: 1608 - protein, 12 aa, synthetic construct
  REGION 1..12: note = short peptide
SNRGASQAGMTG

SEQ ID NO: 1609 - protein, 13 aa, synthetic construct
  REGION 1..13: note = short peptide
FFSLLSGSLNSHG

SEQ ID NO: 1610 - protein, 14 aa, synthetic construct
  REGION 1..14: note = short peptide
KVSSAEGAAKEEPK

SEQ ID NO: 1611 - protein, 12 aa, synthetic construct
  REGION 1..12: note = short peptide
SLSNSTARNVTW

SEQ ID NO: 1612 - protein, 12 aa, synthetic construct
  REGION 1..12: note = short peptide
RMFESENKILSK

SEQ ID NO: 1613 - protein, 10 aa, synthetic construct
  REGION 1..10: note = short peptide
RMNKFSHDLK

SEQ ID NO: 1614 - protein, 13 aa, synthetic construct
  REGION 1..13: note = short peptide
RNHHGSAWEQSRD

SEQ ID NO: 1615 - protein, 15 aa, synthetic construct
  REGION 1..15: note = short peptide
HHRKGTKGSEDSPPK

SEQ ID NO: 1616 - protein, 15 aa, synthetic construct
  REGION 1..15: note = short peptide
RKVSSAEGAAKEEPK

SEQ ID NO: 1617 - protein, 12 aa, synthetic construct
  REGION 1..12: note = short peptide
HPGSRRGGRQGS

SEQ ID NO: 1618 - protein, 14 aa, synthetic construct
  REGION 1..14: note = short peptide
RGAYGGGYGGYDDY

SEQ ID NO: 1619 - protein, 12 aa, synthetic construct
  REGION 1..12: note = short peptide
HPGSSRRGRQGS

SEQ ID NO: 1620 - protein, 9 aa, synthetic construct
  REGION 1..9: note = short peptide
RILPKPTRK

SEQ ID NO: 1621 - protein, 8 aa, synthetic construct
  REGION 1..8: note = short peptide
HIIMYLTL

SEQ ID NO: 1622 - protein, 14 aa, synthetic construct
  REGION 1..14: note = short peptide
GPHQQSHQESTRGR

SEQ ID NO: 1623 - protein, 14 aa, synthetic construct
  REGION 1..14: note = short peptide
GPSTGGRQGSRHEQ

SEQ ID NO: 1624 - protein, 10 aa, synthetic construct
  REGION 1..10: note = short peptide
RSSSPVGLAK

SEQ ID NO: 1625 - protein, 13 aa, synthetic construct
  REGION 1..13: note = short peptide
GPSTGGRQGSRHE

SEQ ID NO: 1626 - protein, 15 aa, synthetic construct
  REGION 1..15: note = short peptide
GPSRGGRQGSHQEQS

SEQ ID NO: 1627 - protein, 14 aa, synthetic construct
  REGION 1..14: note = short peptide
GPSRGGRQGSHQEQ

SEQ ID NO: 1628 - protein, 13 aa, synthetic construct
  REGION 1..13: note = short peptide
GPSGGSRKSISNS

SEQ ID NO: 1629 - protein, 9 aa, synthetic construct
  REGION 1..9: note = short peptide
GLMKDIVGA

SEQ ID NO: 1630 - protein, 12 aa, synthetic construct
  REGION 1..12: note = short peptide
GRPGAPGPAGAR

SEQ ID NO: 1631 - protein, 12 aa, synthetic construct
  REGION 1..12: note = short peptide
GRVGAPGPAGAR

SEQ ID NO: 1632 - protein, 12 aa, synthetic construct
  REGION 1..12: note = short peptide
AAAAAAGSGTPR

SEQ ID NO: 1633 - protein, 8 aa, synthetic construct
  REGION 1..8: note = short peptide
VLNDGSVY

SEQ ID NO: 1634 - protein, 11 aa, synthetic construct
  REGION 1..11: note = short peptide
SQNSAHCMTFW

SEQ ID NO: 1635 - protein, 11 aa, synthetic construct
  REGION 1..11: note = short peptide
SRILSEGANGH

SEQ ID NO: 1636 - protein, 9 aa, synthetic construct
  REGION 1..9: note = short peptide
TECEGDIQK

SEQ ID NO: 1637 - protein, 9 aa, synthetic construct
  REGION 1..9: note = short peptide
TECVHYFEW

SEQ ID NO: 1638 - protein, 9 aa, synthetic construct
  REGION 1..9: note = short peptide
TVNNRTMHY

SEQ ID NO: 1639 - protein, 9 aa, synthetic construct
  REGION 1..9: note = short peptide
YLGAECRTV

SEQ ID NO: 1640 - protein, 10 aa, synthetic construct
  REGION 1..10: note = short peptide
VADEGSFTCF

SEQ ID NO: 1641 - protein, 10 aa, synthetic construct
  REGION 1..10: note = short peptide
SLWSEPVVCG

SEQ ID NO: 1642 - protein, 9 aa, synthetic construct
  REGION 1..9: note = short peptide
YLVQDLKCL

SEQ ID NO: 1643 - protein, 14 aa, synthetic construct
  REGION 1..14: note = short peptide
SLIQTKCADDAMTL

SEQ ID NO: 1644 - protein, 12 aa, synthetic construct
  REGION 1..12: note = short peptide
TNNWEDHLAVKH

SEQ ID NO: 1645 - protein, 9 aa, synthetic construct
  REGION 1..9: note = short peptide
TSSQCGKYY

SEQ ID NO: 1646 - protein, 14 aa, synthetic construct
  REGION 1..14: note = short peptide
TTASTSSSSSSNLN

SEQ ID NO: 1647 - protein, 14 aa, synthetic construct
  REGION 1..14: note = short peptide
SLIQTKCADDAMTL

SEQ ID NO: 1648 - protein, 15 aa, synthetic construct
  REGION 1..15: note = short peptide
GEGEPCGGGGAGRGY

SEQ ID NO: 1649 - protein, 12 aa, synthetic construct
  REGION 1..12: note = short peptide
KEDSCTASSKNY

SEQ ID NO: 1650 - protein, 10 aa, synthetic construct
  REGION 1..10: note = short peptide
ILVDGICIKV

SEQ ID NO: 1651 - protein, 10 aa, synthetic construct
  REGION 1..10: note = short peptide
ILFDCPGQIE

SEQ ID NO: 1652 - protein, 11 aa, synthetic construct
  REGION 1..11: note = short peptide
ILMGCAILPHL

SEQ ID NO: 1653 - protein, 9 aa, synthetic construct
  REGION 1..9: note = short peptide
AVCGKVKCK

SEQ ID NO: 1654 - protein, 9 aa, synthetic construct
  REGION 1..9: note = short peptide
CLNGYTPSR

SEQ ID NO: 1655 - protein, 15 aa, synthetic construct
  REGION 1..15: note = short peptide
CGGGYVKLFPNSLDQ

SEQ ID NO: 1656 - protein, 10 aa, synthetic construct
  REGION 1..10: note = short peptide
CLADYLVPIL

SEQ ID NO: 1657 - protein, 10 aa, synthetic construct
  REGION 1..10: note = short peptide
AEACSGERTY

SEQ ID NO: 1658 - protein, 12 aa, synthetic construct
  REGION 1..12: note = short peptide
QDAEQPTRYETL

SEQ ID NO: 1659 - protein, 13 aa, synthetic construct
  REGION 1..13: note = short peptide
MREIVHIQAGQCG

SEQ ID NO: 1660 - protein, 9 aa, synthetic construct
  REGION 1..9: note = short peptide
RLPCKQIIH

SEQ ID NO: 1661 - protein, 9 aa, synthetic construct
  REGION 1..9: note = short peptide
RLPCLCIYH

SEQ ID NO: 1662 - protein, 14 aa, synthetic construct
  REGION 1..14: note = short peptide
RSKTFPACDGSHNK

SEQ ID NO: 1663 - protein, 10 aa, synthetic construct
  REGION 1..10: note = short peptide
RLCDSKGAYL

SEQ ID NO: 1664 - protein, 9 aa, synthetic construct
  REGION 1..9: note = short peptide
REGMCRQTF

SEQ ID NO: 1665 - protein, 10 aa, synthetic construct
  REGION 1..10: note = short peptide
KMNCYALIRL

SEQ ID NO: 1666 - protein, 9 aa, synthetic construct
  REGION 1..9: note = short peptide
KISDVNCAV

SEQ ID NO: 1667 - protein, 9 aa, synthetic construct
  REGION 1..9: note = short peptide
KTLFSLMQY

SEQ ID NO: 1668 - protein, 15 aa, synthetic construct
  REGION 1..15: note = short peptide
TFDLTKVLEAGDAQP

SEQ ID NO: 1669 - protein, 8 aa, synthetic construct
  REGION 1..8: note = short peptide
AHFPINVV

SEQ ID NO: 1670 - protein, 8 aa, synthetic construct
  REGION 1..8: note = short peptide
ALWTVQEA

SEQ ID NO: 1671 - protein, 10 aa, synthetic construct
  REGION 1..10: note = short peptide
LEDGTCRVTY

SEQ ID NO: 1672 - protein, 14 aa, synthetic construct
  REGION 1..14: note = short peptide
NYGGGGNYNDFGNY

SEQ ID NO: 1673 - protein, 13 aa, synthetic construct
  REGION 1..13: note = short peptide
KTIDSWMSIMVPK

SEQ ID NO: 1674 - protein, 9 aa, synthetic construct
  REGION 1..9: note = short peptide
NHRHFQHHA

SEQ ID NO: 1675 - protein, 14 aa, synthetic construct
  REGION 1..14: note = short peptide
KLIEYYKNGDLSFK

SEQ ID NO: 1676 - protein, 15 aa, synthetic construct
  REGION 1..15: note = short peptide
EDDDVDTKKQKTDED

SEQ ID NO: 1677 - protein, 13 aa, synthetic construct
  REGION 1..13: note = short peptide
AEQVALSRTQVCG

SEQ ID NO: 1678 - protein, 15 aa, synthetic construct
  REGION 1..15: note = short peptide
TAGAASLTKWIQKNP

SEQ ID NO: 1679 - protein, 10 aa, synthetic construct
  REGION 1..10: note = short peptide
VLNGKLFVCG

SEQ ID NO: 1680 - protein, 10 aa, synthetic construct
  REGION 1..10: note = short peptide
VPCPARWQYK

SEQ ID NO: 1681 - protein, 9 aa, synthetic construct
  REGION 1..9: note = short peptide
NLAKCIVSV

SEQ ID NO: 1682 - protein, 12 aa, synthetic construct
  REGION 1..12: note = short peptide
NHHGSAQEQSRD

SEQ ID NO: 1683 - protein, 14 aa, synthetic construct
  REGION 1..14: note = short peptide
QKLSELDDRADALQ

SEQ ID NO: 1684 - protein, 15 aa, synthetic construct
  REGION 1..15: note = short peptide
QPECSPEAPPAEAAE

SEQ ID NO: 1685 - protein, 12 aa, synthetic construct
  REGION 1..12: note = short peptide
ILYSDDGQKWTV

SEQ ID NO: 1686 - protein, 9 aa, synthetic construct
  REGION 1..9: note = short peptide
KLHTGVKPH

SEQ ID NO: 1687 - protein, 11 aa, synthetic construct
  REGION 1..11: note = short peptide
KKTATAVAHCK

SEQ ID NO: 1688 - protein, 9 aa, synthetic construct
  REGION 1..9: note = short peptide
KGLNAYLEK

SEQ ID NO: 1689 - protein, 14 aa, synthetic construct
  REGION 1..14: note = short peptide
SHYEEGPGKNLPFS

SEQ ID NO: 1690 - protein, 12 aa, synthetic construct
  REGION 1..12: note = short peptide
SLSNSTARNVTW

SEQ ID NO: 1691 - protein, 14 aa, synthetic construct
  REGION 1..14: note = short peptide
TTASTSSSSSSNLN

SEQ ID NO: 1692 - protein, 14 aa, synthetic construct
  REGION 1..14: note = short peptide
VLSPADKTNVKAAW

SEQ ID NO: 1693 - protein, 14 aa, synthetic construct
  REGION 1..14: note = short peptide
VLSPADKTNVKAAW

SEQ ID NO: 1694 - protein, 10 aa, synthetic construct
  REGION 1..10: note = short peptide
MMGHRPVLVL

SEQ ID NO: 1695 - protein, 9 aa, synthetic construct
  REGION 1..9: note = short peptide
MPETTETVL

SEQ ID NO: 1696 - protein, 9 aa, synthetic construct
  REGION 1..9: note = short peptide
VLPQRFPQF

SEQ ID NO: 1697 - protein, 15 aa, synthetic construct
  REGION 1..15: note = short peptide
GQVINETSQHHDDLE

SEQ ID NO: 1698 - protein, 10 aa, synthetic construct
  REGION 1..10: note = short peptide
AQQAADKYLY

SEQ ID NO: 1699 - protein, 13 aa, synthetic construct
  REGION 1..13: note = short peptide
KLNISFPATGCQK

SEQ ID NO: 1700 - protein, 10 aa, synthetic construct
  REGION 1..10: note = short peptide
HVSLITPTKR

SEQ ID NO: 1701 - protein, 11 aa, synthetic construct
  REGION 1..11: note = short peptide
TLVNTGIGMTK

SEQ ID NO: 1702 - protein, 10 aa, synthetic construct
  REGION 1..10: note = short peptide
ACARPLISVY

SEQ ID NO: 1703 - protein, 15 aa, synthetic construct
  REGION 1..15: note = short peptide
KVNVDEVGGEALGRL

SEQ ID NO: 1704 - protein, 10 aa, synthetic construct
  REGION 1..10: note = short peptide
ACARPLISVY

SEQ ID NO: 1705 - protein, 9 aa, synthetic construct
  REGION 1..9: note = short peptide
MPVPTTPEF

SEQ ID NO: 1706 - protein, 10 aa, synthetic construct
  REGION 1..10: note = short peptide
GITNKLIGCY

SEQ ID NO: 1707 - protein, 9 aa, synthetic construct
  REGION 1..9: note = short peptide
FPLDLDVKM

SEQ ID NO: 1708 - protein, 9 aa, synthetic construct
  REGION 1..9: note = short peptide
HVSCVKLLL

SEQ ID NO: 1709 - protein, 8 aa, synthetic construct
  REGION 1..8: note = short peptide
SLVIPEKF

SEQ ID NO: 1710 - protein, 14 aa, synthetic construct
  REGION 1..14: note = short peptide
SLKLQASNVTNKND

SEQ ID NO: 1711 - protein, 10 aa, synthetic construct
  REGION 1..10: note = short peptide
DVICLPVERL

SEQ ID NO: 1712 - protein, 15 aa, synthetic construct
  REGION 1..15: note = short peptide
TLVQTKGTGASGSFK

SEQ ID NO: 1713 - protein, 10 aa, synthetic construct
  REGION 1..10: note = short peptide
STNCVEGTAR

SEQ ID NO: 1714 - protein, 13 aa, synthetic construct
  REGION 1..13: note = short peptide
DGKADGAEAKPAE

SEQ ID NO: 1715 - protein, 9 aa, synthetic construct
  REGION 1..9: note = short peptide
DDDIAALVV

SEQ ID NO: 1716 - protein, 11 aa, synthetic construct
  REGION 1..11: note = short peptide
KYMPNVKVAVF

SEQ ID NO: 1717 - protein, 15 aa, synthetic construct
  REGION 1..15: note = short peptide
DSGDGVTHTVPIYDG

SEQ ID NO: 1718 - protein, 15 aa, synthetic construct
  REGION 1..15: note = short peptide
PAYHSSLMDPDTKLI

SEQ ID NO: 1719 - protein, 9 aa, synthetic construct
  REGION 1..9: note = short peptide
MPVHAAVQM

SEQ ID NO: 1720 - protein, 10 aa, synthetic construct
  REGION 1..10: note = short peptide
MPVDDVIGTL

SEQ ID NO: 1721 - protein, 9 aa, synthetic construct
  REGION 1..9: note = short peptide
APRPPPKPM

SEQ ID NO: 1722 - protein, 9 aa, synthetic construct
  REGION 1..9: note = short peptide
LRYPMAVGL

SEQ ID NO: 1723 - protein, 10 aa, synthetic construct
  REGION 1..10: note = short peptide
KQLATKAARK

SEQ ID NO: 1724 - protein, 12 aa, synthetic construct
  REGION 1..12: note = short peptide
AQQAADKYLYVD

SEQ ID NO: 1725 - protein, 9 aa, synthetic construct
  REGION 1..9: note = short peptide
KCSEPQSSK

SEQ ID NO: 1726 - protein, 10 aa, synthetic construct
  REGION 1..10: note = short peptide
MPEQIVVQAL

SEQ ID NO: 1727 - protein, 9 aa, synthetic construct
  REGION 1..9: note = short peptide
CVEPNCRSK

SEQ ID NO: 1728 - protein, 9 aa, synthetic construct
  REGION 1..9: note = short peptide
CVEPNCRSK

SEQ ID NO: 1729 - protein, 10 aa, synthetic construct
  REGION 1..10: note = short peptide
MPFAPAIQTF

SEQ ID NO: 1730 - protein, 13 aa, synthetic construct
  REGION 1..13: note = short peptide
AQRTGLEDPERYL

SEQ ID NO: 1731 - protein, 8 aa, synthetic construct
  REGION 1..8: note = short peptide
MMGHRPVL

SEQ ID NO: 1732 - protein, 9 aa, synthetic construct
  REGION 1..9: note = short peptide
MPTIPALAL

SEQ ID NO: 1733 - protein, 9 aa, synthetic construct
  REGION 1..9: note = short peptide
KEAPPMEKP

SEQ ID NO: 1734 - protein, 10 aa, synthetic construct
  REGION 1..10: note = short peptide
MPVPWPESSL

SEQ ID NO: 1735 - protein, 9 aa, synthetic construct
  REGION 1..9: note = short peptide
MPPPPPQGV

SEQ ID NO: 1736 - protein, 9 aa, synthetic construct
  REGION 1..9: note = short peptide
SLVIPEKFQ

SEQ ID NO: 1737 - protein, 14 aa, synthetic construct
  REGION 1..14: note = short peptide
CSDSAQGSDVSLTA

SEQ ID NO: 1738 - protein, 15 aa, synthetic construct
  REGION 1..15: note = short peptide
LQQCPFEDHVKLVNE

SEQ ID NO: 1739 - protein, 11 aa, synthetic construct
  REGION 1..11: note = short peptide
HPAPLCTIRTL

SEQ ID NO: 1740 - protein, 10 aa, synthetic construct
  REGION 1..10: note = short peptide
RYCKNKPYPK

SEQ ID NO: 1741 - protein, 9 aa, synthetic construct
  REGION 1..9: note = short peptide
DIFPKVTCR

SEQ ID NO: 1742 - protein, 10 aa, synthetic construct
  REGION 1..10: note = short peptide
DIICGFLKER

SEQ ID NO: 1743 - protein, 9 aa, synthetic construct
  REGION 1..9: note = short peptide
VPPQPQPPP

SEQ ID NO: 1744 - protein, 15 aa, synthetic construct
  REGION 1..15: note = short peptide
AEVEQKKKRTFRKFT

SEQ ID NO: 1745 - protein, 14 aa, synthetic construct
  REGION 1..14: note = short peptide
AQKGQLSDDEKFLF

SEQ ID NO: 1746 - protein, 9 aa, synthetic construct
  REGION 1..9: note = short peptide
APRPPPKPM

SEQ ID NO: 1747 - protein, 15 aa, synthetic construct
  REGION 1..15: note = short peptide
NCPFHYNPAQYDYDR

SEQ ID NO: 1748 - protein, 12 aa, synthetic construct
  REGION 1..12: note = short peptide
ALRYPMAVGLNK

SEQ ID NO: 1749 - protein, 13 aa, synthetic construct
  REGION 1..13: note = short peptide
AQKGQLSDDEKFL

SEQ ID NO: 1750 - protein, 9 aa, synthetic construct
  REGION 1..9: note = short peptide
MPDLPNVGL

SEQ ID NO: 1751 - protein, 12 aa, synthetic construct
  REGION 1..12: note = short peptide
AEVEQKKKRTFR

SEQ ID NO: 1752 - protein, 10 aa, synthetic construct
  REGION 1..10: note = short peptide
EEEIAALVID

SEQ ID NO: 1753 - protein, 10 aa, synthetic construct
  REGION 1..10: note = short peptide
LLDDAQRLLY

SEQ ID NO: 1754 - protein, 10 aa, synthetic construct
  REGION 1..10: note = short peptide
KRWSDKVICK

SEQ ID NO: 1755 - protein, 9 aa, synthetic construct
  REGION 1..9: note = short peptide
HGTHITCKR

SEQ ID NO: 1756 - protein, 11 aa, synthetic construct
  REGION 1..11: note = short peptide
EAAEGLGSHDR

SEQ ID NO: 1757 - protein, 12 aa, synthetic construct
  REGION 1..12: note = short peptide
TAADTAAQITQR

SEQ ID NO: 1758 - protein, 9 aa, synthetic construct
  REGION 1..9: note = short peptide
MPFGNVVSA

SEQ ID NO: 1759 - protein, 8 aa, synthetic construct
  REGION 1..8: note = short peptide
HPKYKTEL

SEQ ID NO: 1760 - protein, 8 aa, synthetic construct
  REGION 1..8: note = short peptide
KGRGGLGK

SEQ ID NO: 1761 - protein, 9 aa, synthetic construct
  REGION 1..9: note = short peptide
FPTNSSSHL

SEQ ID NO: 1762 - protein, 13 aa, synthetic construct
  REGION 1..13: note = short peptide
ARKSAPSTGGVKK

SEQ ID NO: 1763 - protein, 10 aa, synthetic construct
  REGION 1..10: note = short peptide
SVFPLAPCSR

SEQ ID NO: 1764 - protein, 13 aa, synthetic construct
  REGION 1..13: note = short peptide
NVVPTAGPLAQKR

SEQ ID NO: 1765 - protein, 9 aa, synthetic construct
  REGION 1..9: note = short peptide
MPQPDFSFL

SEQ ID NO: 1766 - protein, 10 aa, synthetic construct
  REGION 1..10: note = short peptide
MPANGETVTL

SEQ ID NO: 1767 - protein, 8 aa, synthetic construct
  REGION 1..8: note = short peptide
VAKTKNNL

SEQ ID NO: 1768 - protein, 15 aa, synthetic construct
  REGION 1..15: note = short peptide
ASGVAVSDGVIKVFN

SEQ ID NO: 1769 - protein, 10 aa, synthetic construct
  REGION 1..10: note = short peptide
ETVWCLPVLR

SEQ ID NO: 1770 - protein, 9 aa, synthetic construct
  REGION 1..9: note = short peptide
LSEKQALCY

SEQ ID NO: 1771 - protein, 10 aa, synthetic construct
  REGION 1..10: note = short peptide
NPVINGNVAL

SEQ ID NO: 1772 - protein, 10 aa, synthetic construct
  REGION 1..10: note = short peptide
HPVHVDNCIL

SEQ ID NO: 1773 - protein, 9 aa, synthetic construct
  REGION 1..9: note = short peptide
SSANGHEER

SEQ ID NO: 1774 - protein, 8 aa, synthetic construct
  REGION 1..8: note = short peptide
YTDFPCQY

SEQ ID NO: 1775 - protein, 14 aa, synthetic construct
  REGION 1..14: note = short peptide
TKGTGASGSFKLNK

SEQ ID NO: 1776 - protein, 14 aa, synthetic construct
  REGION 1..14: note = short peptide
TKGTGASGSFKLNK

SEQ ID NO: 1777 - protein, 9 aa, synthetic construct
  REGION 1..9: note = short peptide
MPVGPAPGM

SEQ ID NO: 1778 - protein, 12 aa, synthetic construct
  REGION 1..12: note = short peptide
KLPGKGKSTMKK

SEQ ID NO: 1779 - protein, 10 aa, synthetic construct
  REGION 1..10: note = short peptide
HPISDHEATL

SEQ ID NO: 1780 - protein, 10 aa, synthetic construct
  REGION 1..10: note = short peptide
LPLPSCLPAL

SEQ ID NO: 1781 - protein, 8 aa, synthetic construct
  REGION 1..8: note = short peptide
NVLLKNNL

SEQ ID NO: 1782 - protein, 14 aa, synthetic construct
  REGION 1..14: note = short peptide
YDESGPSIVHRKCF

SEQ ID NO: 1783 - protein, 9 aa, synthetic construct
  REGION 1..9: note = short peptide
CPYHSDRQL

SEQ ID NO: 1784 - protein, 11 aa, synthetic construct
  REGION 1..11: note = short peptide
APKKLSCLRSL

SEQ ID NO: 1785 - protein, 10 aa, synthetic construct
  REGION 1..10: note = short peptide
FPFSENQICL

SEQ ID NO: 1786 - protein, 8 aa, synthetic construct
  REGION 1..8: note = short peptide
DFSDINYR

SEQ ID NO: 1787 - protein, 10 aa, synthetic construct
  REGION 1..10: note = short peptide
HPISDHEATL

SEQ ID NO: 1788 - protein, 15 aa, synthetic construct
  REGION 1..15: note = short peptide
IPGHLNSYTIKGLKP

SEQ ID NO: 1789 - protein, 11 aa, synthetic construct
  REGION 1..11: note = short peptide
NIADAVACAKR

SEQ ID NO: 1790 - protein, 10 aa, synthetic construct
  REGION 1..10: note = short peptide
DTNLCAIHAK

SEQ ID NO: 1791 - protein, 11 aa, synthetic construct
  REGION 1..11: note = short peptide
DWCPTGFKVGI

SEQ ID NO: 1792 - protein, 9 aa, synthetic construct
  REGION 1..9: note = short peptide
CIGAWHPAR

SEQ ID NO: 1793 - protein, 9 aa, synthetic construct
  REGION 1..9: note = short peptide
HAVAKNYTL

SEQ ID NO: 1794 - protein, 8 aa, synthetic construct
  REGION 1..8: note = short peptide
MIFKLRAL

SEQ ID NO: 1795 - protein, 9 aa, synthetic construct
  REGION 1..9: note = short peptide
FPLSHNLTA

SEQ ID NO: 1796 - protein, 13 aa, synthetic construct
  REGION 1..13: note = short peptide
FPVPVDPGTPCRL

SEQ ID NO: 1797 - protein, 10 aa, synthetic construct
  REGION 1..10: note = short peptide
TMSGVTTCLR

SEQ ID NO: 1798 - protein, 11 aa, synthetic construct
  REGION 1..11: note = short peptide
YPVDDGCRIHV

SEQ ID NO: 1799 - protein, 11 aa, synthetic construct
  REGION 1..11: note = short peptide
NAIETMPCVKK

SEQ ID NO: 1800 - protein, 12 aa, synthetic construct
  REGION 1..12: note = short peptide
DTYRLDPGTISR

SEQ ID NO: 1801 - protein, 9 aa, synthetic construct
  REGION 1..9: note = short peptide
VVMRDPNTK

SEQ ID NO: 1802 - protein, 12 aa, synthetic construct
  REGION 1..12: note = short peptide
AQKGQLSDDEKF

SEQ ID NO: 1803 - protein, 9 aa, synthetic construct
  REGION 1..9: note = short peptide
VNPIYKYIL

SEQ ID NO: 1804 - protein, 9 aa, synthetic construct
  REGION 1..9: note = short peptide
LGTACGKYY

SEQ ID NO: 1805 - protein, 11 aa, synthetic construct
  REGION 1..11: note = short peptide
RLSCAASGFTF

SEQ ID NO: 1806 - protein, 9 aa, synthetic construct
  REGION 1..9: note = short peptide
LPNDFPTCL

SEQ ID NO: 1807 - protein, 9 aa, synthetic construct
  REGION 1..9: note = short peptide
HAGCPLPAM

SEQ ID NO: 1808 - protein, 8 aa, synthetic construct
  REGION 1..8: note = short peptide
YQKKKLCF

SEQ ID NO: 1809 - protein, 10 aa, synthetic construct
  REGION 1..10: note = short peptide
KTIDKILKCK

SEQ ID NO: 1810 - protein, 13 aa, synthetic construct
  REGION 1..13: note = short peptide
APRMPFSIGQVTM

SEQ ID NO: 1811 - protein, 15 aa, synthetic construct
  REGION 1..15: note = short peptide
GSEMVVAGKLQDRGP

SEQ ID NO: 1812 - protein, 9 aa, synthetic construct
  REGION 1..9: note = short peptide
MPEPTVLSL

SEQ ID NO: 1813 - protein, 15 aa, synthetic construct
  REGION 1..15: note = short peptide
VLSPADKTNVKAAWG

SEQ ID NO: 1814 - protein, 9 aa, synthetic construct
  REGION 1..9: note = short peptide
KEKLCYVAL

SEQ ID NO: 1815 - protein, 9 aa, synthetic construct
  REGION 1..9: note = short peptide
LPIDCSPAL

SEQ ID NO: 1816 - protein, 13 aa, synthetic construct
  REGION 1..13: note = short peptide
SVIEEGDCKRINM

SEQ ID NO: 1817 - protein, 9 aa, synthetic construct
  REGION 1..9: note = short peptide
VIPCFPYAR

SEQ ID NO: 1818 - protein, 12 aa, synthetic construct
  REGION 1..12: note = short peptide
YPVDDGCRIHVI

SEQ ID NO: 1819 - protein, 11 aa, synthetic construct
  REGION 1..11: note = short peptide
KSLDEQCVVGK

SEQ ID NO: 1820 - protein, 10 aa, synthetic construct
  REGION 1..10: note = short peptide
VIDNGSGMCK

SEQ ID NO: 1821 - protein, 15 aa, synthetic construct
  REGION 1..15: note = short peptide
GSEMVVAGKLQDRGP

SEQ ID NO: 1822 - protein, 15 aa, synthetic construct
  REGION 1..15: note = short peptide
VLSPADKTNVKAAWG

SEQ ID NO: 1823 - protein, 10 aa, synthetic construct
  REGION 1..10: note = short peptide
KMPKMKMPTF

SEQ ID NO: 1824 - protein, 8 aa, synthetic construct
  REGION 1..8: note = short peptide
AAGIVASR

SEQ ID NO: 1825 - protein, 10 aa, synthetic construct
  REGION 1..10: note = short peptide
MPYGSLYNVL

SEQ ID NO: 1826 - protein, 9 aa, synthetic construct
  REGION 1..9: note = short peptide
TAALPAAGP

SEQ ID NO: 1827 - protein, 9 aa, synthetic construct
  REGION 1..9: note = short peptide
MPADIATLL

SEQ ID NO: 1828 - protein, 10 aa, synthetic construct
  REGION 1..10: note = short peptide
NTWNNTHISR

SEQ ID NO: 1829 - protein, 9 aa, synthetic construct
  REGION 1..9: note = short peptide
GTCSSVPPR

SEQ ID NO: 1830 - protein, 9 aa, synthetic construct
  REGION 1..9: note = short peptide
LPFDCTQAL

SEQ ID NO: 1831 - protein, 9 aa, synthetic construct
  REGION 1..9: note = short peptide
HLQKSTCGK

SEQ ID NO: 1832 - protein, 11 aa, synthetic construct
  REGION 1..11: note = short peptide
AQQAADKYLYV

SEQ ID NO: 1833 - protein, 10 aa, synthetic construct
  REGION 1..10: note = short peptide
MPIGGDVPAL

SEQ ID NO: 1834 - protein, 13 aa, synthetic construct
  REGION 1..13: note = short peptide
ASGVAVSDGVIKV

SEQ ID NO: 1835 - protein, 9 aa, synthetic construct
  REGION 1..9: note = short peptide
MPHDLITQL

SEQ ID NO: 1836 - protein, 11 aa, synthetic construct
  REGION 1..11: note = short peptide
EVTNQTLDVKR

SEQ ID NO: 1837 - protein, 8 aa, synthetic construct
  REGION 1..8: note = short peptide
AGRKLALK

SEQ ID NO: 1838 - protein, 9 aa, synthetic construct
  REGION 1..9: note = short peptide
LPACGDLSF

SEQ ID NO: 1839 - protein, 15 aa, synthetic construct
  REGION 1..15: note = short peptide
LQQCPFEDHVKLVNE

SEQ ID NO: 1840 - protein, 13 aa, synthetic construct
  REGION 1..13: note = short peptide
SVIEEGDCKRINM

SEQ ID NO: 1841 - protein, 10 aa, synthetic construct
  REGION 1..10: note = short peptide
GITNKLIGCY

SEQ ID NO: 1842 - protein, 9 aa, synthetic construct
  REGION 1..9: note = short peptide
MPSEDVVSL

SEQ ID NO: 1843 - protein, 12 aa, synthetic construct
  REGION 1..12: note = short peptide
QPVDPAHNVSRL

SEQ ID NO: 1844 - protein, 10 aa, synthetic construct
  REGION 1..10: note = short peptide
MPVHMVPTEL

SEQ ID NO: 1845 - protein, 9 aa, synthetic construct
  REGION 1..9: note = short peptide
AFNKTIVKL

SEQ ID NO: 1846 - protein, 9 aa, synthetic construct
  REGION 1..9: note = short peptide
MPNLDSVTL

SEQ ID NO: 1847 - protein, 9 aa, synthetic construct
  REGION 1..9: note = short peptide
DLIGCIIGR

SEQ ID NO: 1848 - protein, 9 aa, synthetic construct
  REGION 1..9: note = short peptide
KIADFGLCK

SEQ ID NO: 1849 - protein, 9 aa, synthetic construct
  REGION 1..9: note = short peptide
GRCHGHFGL

SEQ ID NO: 1850 - protein, 8 aa, synthetic construct
  REGION 1..8: note = short peptide
VHNCSYNY

SEQ ID NO: 1851 - protein, 15 aa, synthetic construct
  REGION 1..15: note = short peptide
GAPGEDGRPGPPGPQ

SEQ ID NO: 1852 - protein, 9 aa, synthetic construct
  REGION 1..9: note = short peptide
APARPGPAA

SEQ ID NO: 1853 - protein, 9 aa, synthetic construct
  REGION 1..9: note = short peptide
KEVRKNFQK

SEQ ID NO: 1854 - protein, 12 aa, synthetic construct
  REGION 1..12: note = short peptide
MPQPLLTNQITL

SEQ ID NO: 1855 - protein, 9 aa, synthetic construct
  REGION 1..9: note = short peptide
MPVLDQSVL

SEQ ID NO: 1856 - protein, 10 aa, synthetic construct
  REGION 1..10: note = short peptide
SPRTPPPLTV

SEQ ID NO: 1857 - protein, 9 aa, synthetic construct
  REGION 1..9: note = short peptide
YTDHQNSSS

SEQ ID NO: 1858 - protein, 11 aa, synthetic construct
  REGION 1..11: note = short peptide
KIRQNSSFTEK

SEQ ID NO: 1859 - protein, 9 aa, synthetic construct
  REGION 1..9: note = short peptide
MPLHVAPLL

SEQ ID NO: 1860 - protein, 15 aa, synthetic construct
  REGION 1..15: note = short peptide
PAYHSSLMDPDTKLI

SEQ ID NO: 1861 - protein, 9 aa, synthetic construct
  REGION 1..9: note = short peptide
MPAGLVAGL

SEQ ID NO: 1862 - protein, 15 aa, synthetic construct
  REGION 1..15: note = short peptide
PAYHSSLMDPDTKLI

SEQ ID NO: 1863 - protein, 11 aa, synthetic construct
  REGION 1..11: note = short peptide
MPVGLIAGASL

SEQ ID NO: 1864 - protein, 10 aa, synthetic construct
  REGION 1..10: note = short peptide
MPMQDIKMIL

SEQ ID NO: 1865 - protein, 10 aa, synthetic construct
  REGION 1..10: note = short peptide
AICSSTKLLK

SEQ ID NO: 1866 - protein, 9 aa, synthetic construct
  REGION 1..9: note = short peptide
AVCGKVKCK

SEQ ID NO: 1867 - protein, 10 aa, synthetic construct
  REGION 1..10: note = short peptide
CVTDISHLVR

SEQ ID NO: 1868 - protein, 11 aa, synthetic construct
  REGION 1..11: note = short peptide
LTDNCLYYFEY

SEQ ID NO: 1869 - protein, 9 aa, synthetic construct
  REGION 1..9: note = short peptide
FLNKLSDYY

SEQ ID NO: 1870 - protein, 9 aa, synthetic construct
  REGION 1..9: note = short peptide
KYLPCFTFL

SEQ ID NO: 1871 - protein, 9 aa, synthetic construct
  REGION 1..9: note = short peptide
ELLTRHCQL

SEQ ID NO: 1872 - protein, 11 aa, synthetic construct
  REGION 1..11: note = short peptide
QPISVDWCFVR

SEQ ID NO: 1873 - protein, 11 aa, synthetic construct
  REGION 1..11: note = short peptide
MSSPCHIEMIL

SEQ ID NO: 1874 - protein, 10 aa, synthetic construct
  REGION 1..10: note = short peptide
DAVNIVCHSK

SEQ ID NO: 1875 - protein, 9 aa, synthetic construct
  REGION 1..9: note = short peptide
AVCGKVKCK

SEQ ID NO: 1876 - protein, 9 aa, synthetic construct
  REGION 1..9: note = short peptide
AVCGKVKCK

SEQ ID NO: 1877 - protein, 9 aa, synthetic construct
  REGION 1..9: note = short peptide
VPSKPPMSL

SEQ ID NO: 1878 - protein, 14 aa, synthetic construct
  REGION 1..14: note = short peptide
EEEIAALVIDNGSG

SEQ ID NO: 1879 - protein, 11 aa, synthetic construct
  REGION 1..11: note = short peptide
IQRTPKIQVYS

SEQ ID NO: 1880 - protein, 10 aa, synthetic construct
  REGION 1..10: note = short peptide
RRSSSVAQVK

SEQ ID NO: 1881 - protein, 9 aa, synthetic construct
  REGION 1..9: note = short peptide
VPIQANETL

SEQ ID NO: 1882 - protein, 9 aa, synthetic construct
  REGION 1..9: note = short peptide
MPQDLSEAL

SEQ ID NO: 1883 - protein, 9 aa, synthetic construct
  REGION 1..9: note = short peptide
LPCGASVIL

SEQ ID NO: 1884 - protein, 12 aa, synthetic construct
  REGION 1..12: note = short peptide
DAKEALNSCNKR

SEQ ID NO: 1885 - protein, 9 aa, synthetic construct
  REGION 1..9: note = short peptide
IYGGISDCW

SEQ ID NO: 1886 - protein, 9 aa, synthetic construct
  REGION 1..9: note = short peptide
LFNHTLTCF

SEQ ID NO: 1887 - protein, 9 aa, synthetic construct
  REGION 1..9: note = short peptide
DIFPKVTCR

SEQ ID NO: 1888 - protein, 11 aa, synthetic construct
  REGION 1..11: note = short peptide
EAICPEGIARL

SEQ ID NO: 1889 - protein, 9 aa, synthetic construct
  REGION 1..9: note = short peptide
CVEPNCRSK

SEQ ID NO: 1890 - protein, 10 aa, synthetic construct
  REGION 1..10: note = short peptide
CSSPKAALRY

SEQ ID NO: 1891 - protein, 10 aa, synthetic construct
  REGION 1..10: note = short peptide
SVAKLGSVCR

SEQ ID NO: 1892 - protein, 9 aa, synthetic construct
  REGION 1..9: note = short peptide
LFNHTLTCF

SEQ ID NO: 1893 - protein, 9 aa, synthetic construct
  REGION 1..9: note = short peptide
LFNHTLTCF

SEQ ID NO: 1894 - protein, 12 aa, synthetic construct
  REGION 1..12: note = short peptide
ISNGTSSVIVSR

SEQ ID NO: 1895 - protein, 14 aa, synthetic construct
  REGION 1..14: note = short peptide
NSAGTDKQNSTLRY

SEQ ID NO: 1896 - protein, 15 aa, synthetic construct
  REGION 1..15: note = short peptide
GERIEKVEHSDLSFS

SEQ ID NO: 1897 - protein, 10 aa, synthetic construct
  REGION 1..10: note = short peptide
MPHLSMQQVL

SEQ ID NO: 1898 - protein, 10 aa, synthetic construct
  REGION 1..10: note = short peptide
MPVDSFNSML

SEQ ID NO: 1899 - protein, 10 aa, synthetic construct
  REGION 1..10: note = short peptide
DTLNGSTEKR

SEQ ID NO: 1900 - protein, 12 aa, synthetic construct
  REGION 1..12: note = short peptide
SSHKTFRIKRFL

SEQ ID NO: 1901 - protein, 12 aa, synthetic construct
  REGION 1..12: note = short peptide
SSHKTFRIKRFL

SEQ ID NO: 1902 - protein, 13 aa, synthetic construct
  REGION 1..13: note = short peptide
APRMPFSIGQVTM

SEQ ID NO: 1903 - protein, 11 aa, synthetic construct
  REGION 1..11: note = short peptide
PDVKQGEANLK

SEQ ID NO: 1904 - protein, 14 aa, synthetic construct
  REGION 1..14: note = short peptide
ATAEVLNIGKKLYE

SEQ ID NO: 1905 - protein, 14 aa, synthetic construct
  REGION 1..14: note = short peptide
TQGKIVDLVKELDR

SEQ ID NO: 1906 - protein, 13 aa, synthetic construct
  REGION 1..13: note = short peptide
SKPHSEAGTAFIQ

SEQ ID NO: 1907 - protein, 10 aa, synthetic construct
  REGION 1..10: note = short peptide
QVDPLSALKY

SEQ ID NO: 1908 - protein, 10 aa, synthetic construct
  REGION 1..10: note = short peptide
EVSNGSVVHR

SEQ ID NO: 1909 - protein, 15 aa, synthetic construct
  REGION 1..15: note = short peptide
EVGSIIGKKGESVKR

SEQ ID NO: 1910 - protein, 9 aa, synthetic construct
  REGION 1..9: note = short peptide
VIPCFPYAR

SEQ ID NO: 1911 - protein, 10 aa, synthetic construct
  REGION 1..10: note = short peptide
DVICLPVERL

SEQ ID NO: 1912 - protein, 10 aa, synthetic construct
  REGION 1..10: note = short peptide
DTVCGKSVER

SEQ ID NO: 1913 - protein, 11 aa, synthetic construct
  REGION 1..11: note = short peptide
TLADCNLLPKL

SEQ ID NO: 1914 - protein, 13 aa, synthetic construct
  REGION 1..13: note = short peptide
KVFERCELARTLK

SEQ ID NO: 1915 - protein, 9 aa, synthetic construct
  REGION 1..9: note = short peptide
SVAKCQLMK

SEQ ID NO: 1916 - protein, 10 aa, synthetic construct
  REGION 1..10: note = short peptide
GTAALGCLVK

SEQ ID NO: 1917 - protein, 9 aa, synthetic construct
  REGION 1..9: note = short peptide
CVSPTVNQR

SEQ ID NO: 1918 - protein, 10 aa, synthetic construct
  REGION 1..10: note = short peptide
KRWNSCKQNK

SEQ ID NO: 1919 - protein, 15 aa, synthetic construct
  REGION 1..15: note = short peptide
GSGEADCGLRPLFEK

SEQ ID NO: 1920 - protein, 13 aa, synthetic construct
  REGION 1..13: note = short peptide
FPECVVDAGKVTL

SEQ ID NO: 1921 - protein, 9 aa, synthetic construct
  REGION 1..9: note = short peptide
CYPEALLHF

SEQ ID NO: 1922 - protein, 12 aa, synthetic construct
  REGION 1..12: note = short peptide
NISFPATGCQKL

SEQ ID NO: 1923 - protein, 10 aa, synthetic construct
  REGION 1..10: note = short peptide
VYSCVTLPYF

SEQ ID NO: 1924 - protein, 11 aa, synthetic construct
  REGION 1..11: note = short peptide
QTPKVAKQEKK

SEQ ID NO: 1925 - protein, 8 aa, synthetic construct
  REGION 1..8: note = short peptide
NLHKRIAL

SEQ ID NO: 1926 - protein, 10 aa, synthetic construct
  REGION 1..10: note = short peptide
GQCGNQIGTK

SEQ ID NO: 1927 - protein, 10 aa, synthetic construct
  REGION 1..10: note = short peptide
MPAMAPNETL

SEQ ID NO: 1928 - protein, 10 aa, synthetic construct
  REGION 1..10: note = short peptide
MPVEVQTELL

SEQ ID NO: 1929 - protein, 11 aa, synthetic construct
  REGION 1..11: note = short peptide
SRMKKEASVKF

SEQ ID NO: 1930 - protein, 9 aa, synthetic construct
  REGION 1..9: note = short peptide
MPLQDSISL

SEQ ID NO: 1931 - protein, 11 aa, synthetic construct
  REGION 1..11: note = short peptide
SGRLWSKAIFA

SEQ ID NO: 1932 - protein, 10 aa, synthetic construct
  REGION 1..10: note = short peptide
SAHLQWMVVR

SEQ ID NO: 1933 - protein, 9 aa, synthetic construct
  REGION 1..9: note = short peptide
MPDSAAALL

SEQ ID NO: 1934 - protein, 9 aa, synthetic construct
  REGION 1..9: note = short peptide
HPRQAAPQM

SEQ ID NO: 1935 - protein, 8 aa, synthetic construct
  REGION 1..8: note = short peptide
SEILPPIN

SEQ ID NO: 1936 - protein, 12 aa, synthetic construct
  REGION 1..12: note = short peptide
ARKSAPSTGGVK

SEQ ID NO: 1937 - protein, 10 aa, synthetic construct
  REGION 1..10: note = short peptide
MPNHSASIQL

SEQ ID NO: 1938 - protein, 15 aa, synthetic construct
  REGION 1..15: note = short peptide
SILKIHAREIFDSRG

SEQ ID NO: 1939 - protein, 9 aa, synthetic construct
  REGION 1..9: note = short peptide
IEHGIVTNW

SEQ ID NO: 1940 - protein, 9 aa, synthetic construct
  REGION 1..9: note = short peptide
EAFDFVKQR

SEQ ID NO: 1941 - protein, 9 aa, synthetic construct
  REGION 1..9: note = short peptide
QPISVDWCF

SEQ ID NO: 1942 - protein, 9 aa, synthetic construct
  REGION 1..9: note = short peptide
MPAPCAQVM

SEQ ID NO: 1943 - protein, 9 aa, synthetic construct
  REGION 1..9: note = short peptide
LPSTCIVTL

SEQ ID NO: 1944 - protein, 15 aa, synthetic construct
  REGION 1..15: note = short peptide
SVFDCQKAMQGLTGR

SEQ ID NO: 1945 - protein, 9 aa, synthetic construct
  REGION 1..9: note = short peptide
GRHRFCFLR

SEQ ID NO: 1946 - protein, 9 aa, synthetic construct
  REGION 1..9: note = short peptide
NRICKVLAV

SEQ ID NO: 1947 - protein, 9 aa, synthetic construct
  REGION 1..9: note = short peptide
NSSDKIIRK

SEQ ID NO: 1948 - protein, 13 aa, synthetic construct
  REGION 1..13: note = short peptide
IPIEVCPISNQVL

SEQ ID NO: 1949 - protein, 9 aa, synthetic construct
  REGION 1..9: note = short peptide
SPYPESICL

SEQ ID NO: 1950 - protein, 10 aa, synthetic construct
  REGION 1..10: note = short peptide
HPVPCEQPAL

SEQ ID NO: 1951 - protein, 8 aa, synthetic construct
  REGION 1..8: note = short peptide
ISQGGGGF

SEQ ID NO: 1952 - protein, 10 aa, synthetic construct
  REGION 1..10: note = short peptide
NVVPTFGKKK

SEQ ID NO: 1953 - protein, 10 aa, synthetic construct
  REGION 1..10: note = short peptide
LMDCRPQELY

SEQ ID NO: 1954 - protein, 10 aa, synthetic construct
  REGION 1..10: note = short peptide
KTIDKILKCK

SEQ ID NO: 1955 - protein, 10 aa, synthetic construct
  REGION 1..10: note = short peptide
KPKECNGVKI

SEQ ID NO: 1956 - protein, 8 aa, synthetic construct
  REGION 1..8: note = short peptide
SEILPPIN

SEQ ID NO: 1957 - protein, 9 aa, synthetic construct
  REGION 1..9: note = short peptide
IEHGIVTNW

SEQ ID NO: 1958 - protein, 9 aa, synthetic construct
  REGION 1..9: note = short peptide
ATAAPAPLC

SEQ ID NO: 1959 - protein, 9 aa, synthetic construct
  REGION 1..9: note = short peptide
FPLNKDLAL

SEQ ID NO: 1960 - protein, 15 aa, synthetic construct
  REGION 1..15: note = short peptide
AQQAADKYLYVDKNF

SEQ ID NO: 1961 - protein, 11 aa, synthetic construct
  REGION 1..11: note = short peptide
RLNITYPMLFK

SEQ ID NO: 1962 - protein, 13 aa, synthetic construct
  REGION 1..13: note = short peptide
FAYNQSAGNPNYR

SEQ ID NO: 1963 - protein, 9 aa, synthetic construct
  REGION 1..9: note = short peptide
KYPDRVPVI

SEQ ID NO: 1964 - protein, 11 aa, synthetic construct
  REGION 1..11: note = short peptide
MPVVAGAVFTL

SEQ ID NO: 1965 - protein, 9 aa, synthetic construct
  REGION 1..9: note = short peptide
MPFGNVISA

SEQ ID NO: 1966 - protein, 9 aa, synthetic construct
  REGION 1..9: note = short peptide
SPVLRNFTF

SEQ ID NO: 1967 - protein, 15 aa, synthetic construct
  REGION 1..15: note = short peptide
GTQGKIVDLVKELDR

SEQ ID NO: 1968 - protein, 12 aa, synthetic construct
  REGION 1..12: note = short peptide
ETVEYNISGAER

SEQ ID NO: 1969 - protein, 9 aa, synthetic construct
  REGION 1..9: note = short peptide
YLNGNYLII

SEQ ID NO: 1970 - protein, 10 aa, synthetic construct
  REGION 1..10: note = short peptide
GVIDVITKTW

SEQ ID NO: 1971 - protein, 9 aa, synthetic construct
  REGION 1..9: note = short peptide
PVHSLNLLL

SEQ ID NO: 1972 - protein, 10 aa, synthetic construct
  REGION 1..10: note = short peptide
NSMSPGVTHR

SEQ ID NO: 1973 - protein, 10 aa, synthetic construct
  REGION 1..10: note = short peptide
MPVDEEVESL

SEQ ID NO: 1974 - protein, 13 aa, synthetic construct
  REGION 1..13: note = short peptide
RRYNQSEAGSHTL

SEQ ID NO: 1975 - protein, 9 aa, synthetic construct
  REGION 1..9: note = short peptide
FIANLSVQR

SEQ ID NO: 1976 - protein, 9 aa, synthetic construct
  REGION 1..9: note = short peptide
NAAGEFCEL

SEQ ID NO: 1977 - protein, 9 aa, synthetic construct
  REGION 1..9: note = short peptide
PAALSQPVL

SEQ ID NO: 1978 - protein, 15 aa, synthetic construct
  REGION 1..15: note = short peptide
NCPYVPNANQADHDK

SEQ ID NO: 1979 - protein, 9 aa, synthetic construct
  REGION 1..9: note = short peptide
IYTCVATNI

SEQ ID NO: 1980 - protein, 9 aa, synthetic construct
  REGION 1..9: note = short peptide
FPIIASCTL

SEQ ID NO: 1981 - protein, 9 aa, synthetic construct
  REGION 1..9: note = short peptide
SVKNKAHCL

SEQ ID NO: 1982 - protein, 9 aa, synthetic construct
  REGION 1..9: note = short peptide
AVVAVVMCR

SEQ ID NO: 1983 - protein, 12 aa, synthetic construct
  REGION 1..12: note = short peptide
SISRAYALCVLY

SEQ ID NO: 1984 - protein, 10 aa, synthetic construct
  REGION 1..10: note = short peptide
MPYGCGEQNM

SEQ ID NO: 1985 - protein, 11 aa, synthetic construct
  REGION 1..11: note = short peptide
ESENNKLCSLY

SEQ ID NO: 1986 - protein, 9 aa, synthetic construct
  REGION 1..9: note = short peptide
CYVKDLSRL

SEQ ID NO: 1987 - protein, 13 aa, synthetic construct
  REGION 1..13: note = short peptide
CVFPNGTEVPNTR

SEQ ID NO: 1988 - protein, 9 aa, synthetic construct
  REGION 1..9: note = short peptide
TAADTCIIF

SEQ ID NO: 1989 - protein, 11 aa, synthetic construct
  REGION 1..11: note = short peptide
EVIEGYEIACR

SEQ ID NO: 1990 - protein, 9 aa, synthetic construct
  REGION 1..9: note = short peptide
TLKVEPCSL

SEQ ID NO: 1991 - protein, 9 aa, synthetic construct
  REGION 1..9: note = short peptide
LFNHTLTCF

SEQ ID NO: 1992 - protein, 9 aa, synthetic construct
  REGION 1..9: note = short peptide
SLKDRIHCV

SEQ ID NO: 1993 - protein, 9 aa, synthetic construct
  REGION 1..9: note = short peptide
KICGKAFSR

SEQ ID NO: 1994 - protein, 10 aa, synthetic construct
  REGION 1..10: note = short peptide
GVIDVITKTW

SEQ ID NO: 1995 - protein, 9 aa, synthetic construct
  REGION 1..9: note = short peptide
LFNHTLTCF

SEQ ID NO: 1996 - protein, 9 aa, synthetic construct
  REGION 1..9: note = short peptide
LFNHTLTCF

SEQ ID NO: 1997 - protein, 10 aa, synthetic construct
  REGION 1..10: note = short peptide
KMPKFKMPSF

SEQ ID NO: 1998 - protein, 9 aa, synthetic construct
  REGION 1..9: note = short peptide
LSSSVLKFI

SEQ ID NO: 1999 - protein, 9 aa, synthetic construct
  REGION 1..9: note = short peptide
LPKARPMSL

SEQ ID NO: 2000 - protein, 11 aa, synthetic construct
  REGION 1..11: note = short peptide
LPIEDITNSTL

SEQ ID NO: 2001 - protein, 11 aa, synthetic construct
  REGION 1..11: note = short peptide
MPAPEEIVEEL

SEQ ID NO: 2002 - protein, 9 aa, synthetic construct
  REGION 1..9: note = short peptide
VVNPKYEGK

SEQ ID NO: 2003 - protein, 8 aa, synthetic construct
  REGION 1..8: note = short peptide
RRAQPPRR

SEQ ID NO: 2004 - protein, 12 aa, synthetic construct
  REGION 1..12: note = short peptide
IVAGYNVSGSVR

SEQ ID NO: 2005 - protein, 9 aa, synthetic construct
  REGION 1..9: note = short peptide
MPPPINPIL

SEQ ID NO: 2006 - protein, 9 aa, synthetic construct
  REGION 1..9: note = short peptide
MPQGNPLLL

SEQ ID NO: 2007 - protein, 9 aa, synthetic construct
  REGION 1..9: note = short peptide
DYIKFLRSI

SEQ ID NO: 2008 - protein, 10 aa, synthetic construct
  REGION 1..10: note = short peptide
MPQSMPEYAL

SEQ ID NO: 2009 - protein, 9 aa, synthetic construct
  REGION 1..9: note = short peptide
QPVGKNLTL

SEQ ID NO: 2010 - protein, 11 aa, synthetic construct
  REGION 1..11: note = short peptide
SNGTSSVIVSR

SEQ ID NO: 2011 - protein, 11 aa, synthetic construct
  REGION 1..11: note = short peptide
KPWNGSHRHVL

SEQ ID NO: 2012 - protein, 13 aa, synthetic construct
  REGION 1..13: note = short peptide
RVQNITQVGSVTK

SEQ ID NO: 2013 - protein, 15 aa, synthetic construct
  REGION 1..15: note = short peptide
KDSTYSLSSTLTLSK

SEQ ID NO: 2014 - protein, 13 aa, synthetic construct
  REGION 1..13: note = short peptide
VGDEAQSKRGVLT

SEQ ID NO: 2015 - protein, 12 aa, synthetic construct
  REGION 1..12: note = short peptide
FPANPANISVAL

SEQ ID NO: 2016 - protein, 11 aa, synthetic construct
  REGION 1..11: note = short peptide
ASDSGKYLCYF

SEQ ID NO: 2017 - protein, 9 aa, synthetic construct
  REGION 1..9: note = short peptide
KPRKFDCEL

SEQ ID NO: 2018 - protein, 9 aa, synthetic construct
  REGION 1..9: note = short peptide
TYGERFCYL

SEQ ID NO: 2019 - protein, 8 aa, synthetic construct
  REGION 1..8: note = short peptide
GLASGANY

SEQ ID NO: 2020 - protein, 10 aa, synthetic construct
  REGION 1..10: note = short peptide
ETVWCLPVLR

SEQ ID NO: 2021 - protein, 10 aa, synthetic construct
  REGION 1..10: note = short peptide
HTKDQPLKCK

SEQ ID NO: 2022 - protein, 11 aa, synthetic construct
  REGION 1..11: note = short peptide
IYIVGGCLHEL

SEQ ID NO: 2023 - protein, 11 aa, synthetic construct
  REGION 1..11: note = short peptide
QVVDQCSEILR

SEQ ID NO: 2024 - protein, 11 aa, synthetic construct
  REGION 1..11: note = short peptide
YGCDLGPDGRL

SEQ ID NO: 2025 - protein, 11 aa, synthetic construct
  REGION 1..11: note = short peptide
YPDSPSACLVL

SEQ ID NO: 2026 - protein, 10 aa, synthetic construct
  REGION 1..10: note = short peptide
GCSKEEIVQF

SEQ ID NO: 2027 - protein, 9 aa, synthetic construct
  REGION 1..9: note = short peptide
KITDFGLCK

SEQ ID NO: 2028 - protein, 10 aa, synthetic construct
  REGION 1..10: note = short peptide
HPACVNEIAL

SEQ ID NO: 2029 - protein, 12 aa, synthetic construct
  REGION 1..12: note = short peptide
FPIFSEKACDEL

SEQ ID NO: 2030 - protein, 12 aa, synthetic construct
  REGION 1..12: note = short peptide
ETARLDCQVQGR

SEQ ID NO: 2031 - protein, 9 aa, synthetic construct
  REGION 1..9: note = short peptide
PYVVNITCF

SEQ ID NO: 2032 - protein, 10 aa, synthetic construct
  REGION 1..10: note = short peptide
NVSSAEAVLR

SEQ ID NO: 2033 - protein, 9 aa, synthetic construct
  REGION 1..9: note = short peptide
DSSPEHCGR

SEQ ID NO: 2034 - protein, 9 aa, synthetic construct
  REGION 1..9: note = short peptide
DLICRAHQV

SEQ ID NO: 2035 - protein, 14 aa, synthetic construct
  REGION 1..14: note = short peptide
NNIELGTACGKYYR

SEQ ID NO: 2036 - protein, 9 aa, synthetic construct
  REGION 1..9: note = short peptide
NLIGCIIGR

SEQ ID NO: 2037 - protein, 11 aa, synthetic construct
  REGION 1..11: note = short peptide
MSSPCHIEMIL

SEQ ID NO: 2038 - protein, 11 aa, synthetic construct
  REGION 1..11: note = short peptide
MSSPCHIEMIL

SEQ ID NO: 2039 - protein, 8 aa, synthetic construct
  REGION 1..8: note = short peptide
DSICNNKW

SEQ ID NO: 2040 - protein, 9 aa, synthetic construct
  REGION 1..9: note = short peptide
LPADCQIHL

SEQ ID NO: 2041 - protein, 8 aa, synthetic construct
  REGION 1..8: note = short peptide
GLCNRAVF

SEQ ID NO: 2042 - protein, 9 aa, synthetic construct
  REGION 1..9: note = short peptide
SRKSFSCKY

SEQ ID NO: 2043 - protein, 9 aa, synthetic construct
  REGION 1..9: note = short peptide
VVCGTPLFK

SEQ ID NO: 2044 - protein, 11 aa, synthetic construct
  REGION 1..11: note = short peptide
QVVDQCSEILR

SEQ ID NO: 2045 - protein, 11 aa, synthetic construct
  REGION 1..11: note = short peptide
QVVDQCSEILR

SEQ ID NO: 2046 - protein, 9 aa, synthetic construct
  REGION 1..9: note = short peptide
NLIGCIIGR

SEQ ID NO: 2047 - protein, 9 aa, synthetic construct
  REGION 1..9: note = short peptide
NLIGCIIGR

SEQ ID NO: 2048 - protein, 9 aa, synthetic construct
  REGION 1..9: note = short peptide
SSSPVNVKK

SEQ ID NO: 2049 - protein, 11 aa, synthetic construct
  REGION 1..11: note = short peptide
ATLKDQLIYNL

SEQ ID NO: 2050 - protein, 11 aa, synthetic construct
  REGION 1..11: note = short peptide
DVVGPEGMEKF

SEQ ID NO: 2051 - protein, 10 aa, synthetic construct
  REGION 1..10: note = short peptide
MPSSDTTVTF

SEQ ID NO: 2052 - protein, 15 aa, synthetic construct
  REGION 1..15: note = short peptide
KKSGTSPAATAKSHL

SEQ ID NO: 2053 - protein, 12 aa, synthetic construct
  REGION 1..12: note = short peptide
SSAHFNRGPAYG

SEQ ID NO: 2054 - protein, 9 aa, synthetic construct
  REGION 1..9: note = short peptide
MPHEELPSL

SEQ ID NO: 2055 - protein, 9 aa, synthetic construct
  REGION 1..9: note = short peptide
NPANISVAL

SEQ ID NO: 2056 - protein, 8 aa, synthetic construct
  REGION 1..8: note = short peptide
DDDIAALV

SEQ ID NO: 2057 - protein, 11 aa, synthetic construct
  REGION 1..11: note = short peptide
FAITAIKGVGR

SEQ ID NO: 2058 - protein, 10 aa, synthetic construct
  REGION 1..10: note = short peptide
ATNFLAHEKI

SEQ ID NO: 2059 - protein, 9 aa, synthetic construct
  REGION 1..9: note = short peptide
MPIGPDVSL

SEQ ID NO: 2060 - protein, 11 aa, synthetic construct
  REGION 1..11: note = short peptide
ALRGALLGCLC

SEQ ID NO: 2061 - protein, 12 aa, synthetic construct
  REGION 1..12: note = short peptide
KVLRDNIQGITK

SEQ ID NO: 2062 - protein, 14 aa, synthetic construct
  REGION 1..14: note = short peptide
SDGESIGNCPFCQR

SEQ ID NO: 2063 - protein, 15 aa, synthetic construct
  REGION 1..15: note = short peptide
YNEATGNKYVPRAIL

SEQ ID NO: 2064 - protein, 8 aa, synthetic construct
  REGION 1..8: note = short peptide
KRGVAIAR

SEQ ID NO: 2065 - protein, 10 aa, synthetic construct
  REGION 1..10: note = short peptide
GFIANLSVQR

SEQ ID NO: 2066 - protein, 10 aa, synthetic construct
  REGION 1..10: note = short peptide
KQCSALQHVK

SEQ ID NO: 2067 - protein, 9 aa, synthetic construct
  REGION 1..9: note = short peptide
YPNGTSAAL

SEQ ID NO: 2068 - protein, 14 aa, synthetic construct
  REGION 1..14: note = short peptide
VGDEAQSKRGVLTL

SEQ ID NO: 2069 - protein, 9 aa, synthetic construct
  REGION 1..9: note = short peptide
NAVDEEICL

SEQ ID NO: 2070 - protein, 9 aa, synthetic construct
  REGION 1..9: note = short peptide
RIAASKCRK

SEQ ID NO: 2071 - protein, 9 aa, synthetic construct
  REGION 1..9: note = short peptide
NLIGCIIGR

SEQ ID NO: 2072 - protein, 10 aa, synthetic construct
  REGION 1..10: note = short peptide
LASLGCISRY

SEQ ID NO: 2073 - protein, 9 aa, synthetic construct
  REGION 1..9: note = short peptide
RPLPEDFCL

SEQ ID NO: 2074 - protein, 9 aa, synthetic construct
  REGION 1..9: note = short peptide
IVIGCGTSY

SEQ ID NO: 2075 - protein, 11 aa, synthetic construct
  REGION 1..11: note = short peptide
NVITWNDIHHK

SEQ ID NO: 2076 - protein, 9 aa, synthetic construct
  REGION 1..9: note = short peptide
LRNCLRILM

SEQ ID NO: 2077 - protein, 9 aa, synthetic construct
  REGION 1..9: note = short peptide
KLPCKILQR

SEQ ID NO: 2078 - protein, 11 aa, synthetic construct
  REGION 1..11: note = short peptide
GPCGLRVAVEL

SEQ ID NO: 2079 - protein, 8 aa, synthetic construct
  REGION 1..8: note = short peptide
CEGSSATL

SEQ ID NO: 2080 - protein, 11 aa, synthetic construct
  REGION 1..11: note = short peptide
APKKLSCLRSL

SEQ ID NO: 2081 - protein, 10 aa, synthetic construct
  REGION 1..10: note = short peptide
MPRLHQDCAL

SEQ ID NO: 2082 - protein, 10 aa, synthetic construct
  REGION 1..10: note = short peptide
NVTELTDLLK

SEQ ID NO: 2083 - protein, 11 aa, synthetic construct
  REGION 1..11: note = short peptide
KSKVTNGVGKK

SEQ ID NO: 2084 - protein, 9 aa, synthetic construct
  REGION 1..9: note = short peptide
TPIKNSPSL

SEQ ID NO: 2085 - protein, 9 aa, synthetic construct
  REGION 1..9: note = short peptide
AICKNGISK

SEQ ID NO: 2086 - protein, 15 aa, synthetic construct
  REGION 1..15: note = short peptide
KKSGTSPAATAKSHL

SEQ ID NO: 2087 - protein, 12 aa, synthetic construct
  REGION 1..12: note = short peptide
RRANLTSMLIQR

SEQ ID NO: 2088 - protein, 10 aa, synthetic construct
  REGION 1..10: note = short peptide
GTIFIIKGVR

SEQ ID NO: 2089 - protein, 8 aa, synthetic construct
  REGION 1..8: note = short peptide
EADGGGDY

SEQ ID NO: 2090 - protein, 11 aa, synthetic construct
  REGION 1..11: note = short peptide
IAYQKKKLCFK

SEQ ID NO: 2091 - protein, 10 aa, synthetic construct
  REGION 1..10: note = short peptide
RYAGLYFCIC

SEQ ID NO: 2092 - protein, 9 aa, synthetic construct
  REGION 1..9: note = short peptide
IFNGTFVKL

SEQ ID NO: 2093 - protein, 9 aa, synthetic construct
  REGION 1..9: note = short peptide
KPCPVQIVL

SEQ ID NO: 2094 - protein, 11 aa, synthetic construct
  REGION 1..11: note = short peptide
PYMDSPQSIGF

SEQ ID NO: 2095 - protein, 15 aa, synthetic construct
  REGION 1..15: note = short peptide
LTWDPPKNDGGSRIK

SEQ ID NO: 2096 - protein, 9 aa, synthetic construct
  REGION 1..9: note = short peptide
TFEELHFEI

SEQ ID NO: 2097 - protein, 9 aa, synthetic construct
  REGION 1..9: note = short peptide
VTAPRTVLL

SEQ ID NO: 2098 - protein, 9 aa, synthetic construct
  REGION 1..9: note = short peptide
HPTNASHQL

SEQ ID NO: 2099 - protein, 9 aa, synthetic construct
  REGION 1..9: note = short peptide
VVAAVTLCR

SEQ ID NO: 2100 - protein, 8 aa, synthetic construct
  REGION 1..8: note = short peptide
EKPASSGK

SEQ ID NO: 2101 - protein, 10 aa, synthetic construct
  REGION 1..10: note = short peptide
KPQQVRNMTL

SEQ ID NO: 2102 - protein, 9 aa, synthetic construct
  REGION 1..9: note = short peptide
PYFNVSQQF

SEQ ID NO: 2103 - protein, 15 aa, synthetic construct
  REGION 1..15: note = short peptide
GILNVSAVDKSTGKE

SEQ ID NO: 2104 - protein, 14 aa, synthetic construct
  REGION 1..14: note = short peptide
SGRLWSKAIFAGYK

SEQ ID NO: 2105 - protein, 10 aa, synthetic construct
  REGION 1..10: note = short peptide
FPLSHNLTAI

SEQ ID NO: 2106 - protein, 10 aa, synthetic construct
  REGION 1..10: note = short peptide
ACPLEKALDV

SEQ ID NO: 2107 - protein, 14 aa, synthetic construct
  REGION 1..14: note = short peptide
TPISPGRASGMTTL

SEQ ID NO: 2108 - protein, 9 aa, synthetic construct
  REGION 1..9: note = short peptide
PLERDSELL

SEQ ID NO: 2109 - protein, 13 aa, synthetic construct
  REGION 1..13: note = short peptide
ARKSAPATGGVKK

SEQ ID NO: 2110 - protein, 9 aa, synthetic construct
  REGION 1..9: note = short peptide
YPSSINLTL

SEQ ID NO: 2111 - protein, 10 aa, synthetic construct
  REGION 1..10: note = short peptide
IIYKNGTSKK

SEQ ID NO: 2112 - protein, 9 aa, synthetic construct
  REGION 1..9: note = short peptide
FYSNSTNSF

SEQ ID NO: 2113 - protein, 10 aa, synthetic construct
  REGION 1..10: note = short peptide
LPHNVTWADL

SEQ ID NO: 2114 - protein, 11 aa, synthetic construct
  REGION 1..11: note = short peptide
DVTPIPSDSTR

SEQ ID NO: 2115 - protein, 13 aa, synthetic construct
  REGION 1..13: note = short peptide
FTITGNNSNFAQR

SEQ ID NO: 2116 - protein, 13 aa, synthetic construct
  REGION 1..13: note = short peptide
SSILPFTPPVVKR

SEQ ID NO: 2117 - protein, 9 aa, synthetic construct
  REGION 1..9: note = short peptide
MPLNVADLI

SEQ ID NO: 2118 - protein, 9 aa, synthetic construct
  REGION 1..9: note = short peptide
FPACVSLVL

SEQ ID NO: 2119 - protein, 13 aa, synthetic construct
  REGION 1..13: note = short peptide
LPINGETQKTISL

SEQ ID NO: 2120 - protein, 11 aa, synthetic construct
  REGION 1..11: note = short peptide
MSSPCHIEMIL

SEQ ID NO: 2121 - protein, 12 aa, synthetic construct
  REGION 1..12: note = short peptide
LPVSICRSCETL

SEQ ID NO: 2122 - protein, 9 aa, synthetic construct
  REGION 1..9: note = short peptide
RPLPEDFCL

SEQ ID NO: 2123 - protein, 10 aa, synthetic construct
  REGION 1..10: note = short peptide
FLEEPCGWMY

SEQ ID NO: 2124 - protein, 9 aa, synthetic construct
  REGION 1..9: note = short peptide
LPSPDAPCL

SEQ ID NO: 2125 - protein, 10 aa, synthetic construct
  REGION 1..10: note = short peptide
ATCGLPVTGR

SEQ ID NO: 2126 - protein, 8 aa, synthetic construct
  REGION 1..8: note = short peptide
WSDLPICY

SEQ ID NO: 2127 - protein, 9 aa, synthetic construct
  REGION 1..9: note = short peptide
YPDEKSVCL

SEQ ID NO: 2128 - protein, 12 aa, synthetic construct
  REGION 1..12: note = short peptide
KYINTVVSCLVF

SEQ ID NO: 2129 - protein, 10 aa, synthetic construct
  REGION 1..10: note = short peptide
VYSCVTLPYF

SEQ ID NO: 2130 - protein, 12 aa, synthetic construct
  REGION 1..12: note = short peptide
NVIEACVQTGTR

SEQ ID NO: 2131 - protein, 9 aa, synthetic construct
  REGION 1..9: note = short peptide
DTGLCRVLY

SEQ ID NO: 2132 - protein, 8 aa, synthetic construct
  REGION 1..8: note = short peptide
TEIPIPLN

SEQ ID NO: 2133 - protein, 9 aa, synthetic construct
  REGION 1..9: note = short peptide
VPITDPCEL

SEQ ID NO: 2134 - protein, 11 aa, synthetic construct
  REGION 1..11: note = short peptide
YPFPKDCSQAM

SEQ ID NO: 2135 - protein, 10 aa, synthetic construct
  REGION 1..10: note = short peptide
CPAPGPHPAL

SEQ ID NO: 2136 - protein, 9 aa, synthetic construct
  REGION 1..9: note = short peptide
LVNSKRQCL

SEQ ID NO: 2137 - protein, 10 aa, synthetic construct
  REGION 1..10: note = short peptide
TTSDGTCTVR

SEQ ID NO: 2138 - protein, 12 aa, synthetic construct
  REGION 1..12: note = short peptide
FPIFSEKACDEL

SEQ ID NO: 2139 - protein, 9 aa, synthetic construct
  REGION 1..9: note = short peptide
NPIDQCNTL

SEQ ID NO: 2140 - protein, 9 aa, synthetic construct
  REGION 1..9: note = short peptide
LGNAFLSHI

SEQ ID NO: 2141 - protein, 14 aa, synthetic construct
  REGION 1..14: note = short peptide
NISFPATGCQKLIE

SEQ ID NO: 2142 - protein, 14 aa, synthetic construct
  REGION 1..14: note = short peptide
QAIKVLENIELNKK

SEQ ID NO: 2143 - protein, 9 aa, synthetic construct
  REGION 1..9: note = short peptide
CPVGKDWKL

SEQ ID NO: 2144 - protein, 10 aa, synthetic construct
  REGION 1..10: note = short peptide
VVDTGTNACY

SEQ ID NO: 2145 - protein, 8 aa, synthetic construct
  REGION 1..8: note = short peptide
CSNGVTHR

SEQ ID NO: 2146 - protein, 8 aa, synthetic construct
  REGION 1..8: note = short peptide
CSNGVTHR

SEQ ID NO: 2147 - protein, 9 aa, synthetic construct
  REGION 1..9: note = short peptide
VPACARSTL

SEQ ID NO: 2148 - protein, 9 aa, synthetic construct
  REGION 1..9: note = short peptide
VVAAVTLCR

SEQ ID NO: 2149 - protein, 10 aa, synthetic construct
  REGION 1..10: note = short peptide
ACPLEKALDV

SEQ ID NO: 2150 - protein, 9 aa, synthetic construct
  REGION 1..9: note = short peptide
REIAQDFKT

SEQ ID NO: 2151 - protein, 9 aa, synthetic construct
  REGION 1..9: note = short peptide
APVKPGPAL

SEQ ID NO: 2152 - protein, 9 aa, synthetic construct
  REGION 1..9: note = short peptide
FVPKDPLDL

SEQ ID NO: 2153 - protein, 8 aa, synthetic construct
  REGION 1..8: note = short peptide
MPVLKVVL

SEQ ID NO: 2154 - protein, 8 aa, synthetic construct
  REGION 1..8: note = short peptide
YASTAKCL

SEQ ID NO: 2155 - protein, 11 aa, synthetic construct
  REGION 1..11: note = short peptide
AAVLNAERLEV

SEQ ID NO: 2156 - protein, 11 aa, synthetic construct
  REGION 1..11: note = short peptide
LSALEEYTKKL

SEQ ID NO: 2157 - protein, 9 aa, synthetic construct
  REGION 1..9: note = short peptide
KKAELLKKM

SEQ ID NO: 2158 - protein, 8 aa, synthetic construct
  REGION 1..8: note = short peptide
KIVPFFKL

SEQ ID NO: 2159 - protein, 9 aa, synthetic construct
  REGION 1..9: note = short peptide
LPLPNFSSL

SEQ ID NO: 2160 - protein, 15 aa, synthetic construct
  REGION 1..15: note = short peptide
AALGSPSHTFRGLLR

SEQ ID NO: 2161 - protein, 9 aa, synthetic construct
  REGION 1..9: note = short peptide
VVYPWTQRF

SEQ ID NO: 2162 - protein, 14 aa, synthetic construct
  REGION 1..14: note = short peptide
AAAAVVEFQRAQSL

SEQ ID NO: 2163 - protein, 9 aa, synthetic construct
  REGION 1..9: note = short peptide
TEKGLPLRK

SEQ ID NO: 2164 - protein, 12 aa, synthetic construct
  REGION 1..12: note = short peptide
RLASSVLRCGKK

SEQ ID NO: 2165 - protein, 10 aa, synthetic construct
  REGION 1..10: note = short peptide
GQSNHTVSSK

SEQ ID NO: 2166 - protein, 13 aa, synthetic construct
  REGION 1..13: note = short peptide
FRSRGGGGGGFHR

SEQ ID NO: 2167 - protein, 9 aa, synthetic construct
  REGION 1..9: note = short peptide
HPFGYNLTL

SEQ ID NO: 2168 - protein, 8 aa, synthetic construct
  REGION 1..8: note = short peptide
HSGGGASF

SEQ ID NO: 2169 - protein, 13 aa, synthetic construct
  REGION 1..13: note = short peptide
QTVDLFEGKDMAA

SEQ ID NO: 2170 - protein, 9 aa, synthetic construct
  REGION 1..9: note = short peptide
TYGRGYPGF

SEQ ID NO: 2171 - protein, 15 aa, synthetic construct
  REGION 1..15: note = short peptide
TYMRIYKKGDIVDIK

SEQ ID NO: 2172 - protein, 10 aa, synthetic construct
  REGION 1..10: note = short peptide
LVVYPWTQRF

SEQ ID NO: 2173 - protein, 11 aa, synthetic construct
  REGION 1..11: note = short peptide
MPAAQEGAVAF

SEQ ID NO: 2174 - protein, 11 aa, synthetic construct
  REGION 1..11: note = short peptide
DSAGKTTLLYK

SEQ ID NO: 2175 - protein, 9 aa, synthetic construct
  REGION 1..9: note = short peptide
MPVIPMNTI

SEQ ID NO: 2176 - protein, 15 aa, synthetic construct
  REGION 1..15: note = short peptide
YLRGGAGVGSMTKIY

SEQ ID NO: 2177 - protein, 15 aa, synthetic construct
  REGION 1..15: note = short peptide
DDDIAALVVDNGSGM

SEQ ID NO: 2178 - protein, 9 aa, synthetic construct
  REGION 1..9: note = short peptide
SVVSVIVKN

SEQ ID NO: 2179 - protein, 9 aa, synthetic construct
  REGION 1..9: note = short peptide
RGAPPPGMM

SEQ ID NO: 2180 - protein, 9 aa, synthetic construct
  REGION 1..9: note = short peptide
FIRNYTIFY

SEQ ID NO: 2181 - protein, 10 aa, synthetic construct
  REGION 1..10: note = short peptide
RQKAVSLFLC

SEQ ID NO: 2182 - protein, 8 aa, synthetic construct
  REGION 1..8: note = short peptide
ARGPLKCV

SEQ ID NO: 2183 - protein, 9 aa, synthetic construct
  REGION 1..9: note = short peptide
FQSTTGHCV

SEQ ID NO: 2184 - protein, 9 aa, synthetic construct
  REGION 1..9: note = short peptide
TVCKLSVSK

SEQ ID NO: 2185 - protein, 9 aa, synthetic construct
  REGION 1..9: note = short peptide
HAGCPLPAM

SEQ ID NO: 2186 - protein, 9 aa, synthetic construct
  REGION 1..9: note = short peptide
SLKEKTSCV

SEQ ID NO: 2187 - protein, 12 aa, synthetic construct
  REGION 1..12: note = short peptide
RYSSAFCNKLFF

SEQ ID NO: 2188 - protein, 9 aa, synthetic construct
  REGION 1..9: note = short peptide
RTFCKKCGK

SEQ ID NO: 2189 - protein, 12 aa, synthetic construct
  REGION 1..12: note = short peptide
LYLPKETCLITF

SEQ ID NO: 2190 - protein, 10 aa, synthetic construct
  REGION 1..10: note = short peptide
GTAALGCLVK

SEQ ID NO: 2191 - protein, 10 aa, synthetic construct
  REGION 1..10: note = short peptide
GRISCTIANR

SEQ ID NO: 2192 - protein, 9 aa, synthetic construct
  REGION 1..9: note = short peptide
RPHHSIRCM

SEQ ID NO: 2193 - protein, 11 aa, synthetic construct
  REGION 1..11: note = short peptide
ASDSGKYLCYF

SEQ ID NO: 2194 - protein, 9 aa, synthetic construct
  REGION 1..9: note = short peptide
GRCVNQWQL

SEQ ID NO: 2195 - protein, 9 aa, synthetic construct
  REGION 1..9: note = short peptide
CYGDITIHF

SEQ ID NO: 2196 - protein, 11 aa, synthetic construct
  REGION 1..11: note = short peptide
DIANDALQHCK

SEQ ID NO: 2197 - protein, 10 aa, synthetic construct
  REGION 1..10: note = short peptide
SGADITNVCR

SEQ ID NO: 2198 - protein, 10 aa, synthetic construct
  REGION 1..10: note = short peptide
DLCREKLVVR

SEQ ID NO: 2199 - protein, 11 aa, synthetic construct
  REGION 1..11: note = short peptide
LLEDSCHYLLY

SEQ ID NO: 2200 - protein, 14 aa, synthetic construct
  REGION 1..14: note = short peptide
DIKCVLNEGMPIYR

SEQ ID NO: 2201 - protein, 9 aa, synthetic construct
  REGION 1..9: note = short peptide
YPSTPEPCA

SEQ ID NO: 2202 - protein, 9 aa, synthetic construct
  REGION 1..9: note = short peptide
LPACIKLIL

SEQ ID NO: 2203 - protein, 10 aa, synthetic construct
  REGION 1..10: note = short peptide
KVFNGCPLKI

SEQ ID NO: 2204 - protein, 9 aa, synthetic construct
  REGION 1..9: note = short peptide
LYENCFHIL

SEQ ID NO: 2205 - protein, 11 aa, synthetic construct
  REGION 1..11: note = short peptide
EVIQNCPIDVR

SEQ ID NO: 2206 - protein, 9 aa, synthetic construct
  REGION 1..9: note = short peptide
YPVCVSKVV

SEQ ID NO: 2207 - protein, 10 aa, synthetic construct
  REGION 1..10: note = short peptide
KVFDGCPLKI

SEQ ID NO: 2208 - protein, 9 aa, synthetic construct
  REGION 1..9: note = short peptide
SRQKGITCR

SEQ ID NO: 2209 - protein, 9 aa, synthetic construct
  REGION 1..9: note = short peptide
CYSDAFAKL

SEQ ID NO: 2210 - protein, 9 aa, synthetic construct
  REGION 1..9: note = short peptide
KPNRLTCTL

SEQ ID NO: 2211 - protein, 11 aa, synthetic construct
  REGION 1..11: note = short peptide
IPIEACHFVSL

SEQ ID NO: 2212 - protein, 9 aa, synthetic construct
  REGION 1..9: note = short peptide
RLAATKCRK

SEQ ID NO: 2213 - protein, 9 aa, synthetic construct
  REGION 1..9: note = short peptide
LTNNDLYRI

SEQ ID NO: 2214 - protein, 10 aa, synthetic construct
  REGION 1..10: note = short peptide
HPYSECDFKL

SEQ ID NO: 2215 - protein, 11 aa, synthetic construct
  REGION 1..11: note = short peptide
RISKDLANICK

SEQ ID NO: 2216 - protein, 9 aa, synthetic construct
  REGION 1..9: note = short peptide
TLCDLYETL

SEQ ID NO: 2217 - protein, 9 aa, synthetic construct
  REGION 1..9: note = short peptide
VVYPWTQRF

SEQ ID NO: 2218 - protein, 10 aa, synthetic construct
  REGION 1..10: note = short peptide
LVVYPWTQRF

SEQ ID NO: 2219 - protein, 10 aa, synthetic construct
  REGION 1..10: note = short peptide
KVFNGCPLKI

SEQ ID NO: 2220 - protein, 10 aa, synthetic construct
  REGION 1..10: note = short peptide
KVFNGCPLKI

SEQ ID NO: 2221 - protein, 8 aa, synthetic construct
  REGION 1..8: note = short peptide
RAASPVLL

SEQ ID NO: 2222 - protein, 10 aa, synthetic construct
  REGION 1..10: note = short peptide
RAGYANGSGY

SEQ ID NO: 2223 - protein, 9 aa, synthetic construct
  REGION 1..9: note = short peptide
DVKKEPLGR

SEQ ID NO: 2224 - protein, 12 aa, synthetic construct
  REGION 1..12: note = short peptide
RPAAPRPPFSTM

SEQ ID NO: 2225 - protein, 9 aa, synthetic construct
  REGION 1..9: note = short peptide
MPDDLLTTL

SEQ ID NO: 2226 - protein, 9 aa, synthetic construct
  REGION 1..9: note = short peptide
MPVIPMNTI

SEQ ID NO: 2227 - protein, 10 aa, synthetic construct
  REGION 1..10: note = short peptide
ADFNGTKASE

SEQ ID NO: 2228 - protein, 13 aa, synthetic construct
  REGION 1..13: note = short peptide
SYDRAITVFSPDG

SEQ ID NO: 2229 - protein, 9 aa, synthetic construct
  REGION 1..9: note = short peptide
MPVGPDAIL

SEQ ID NO: 2230 - protein, 9 aa, synthetic construct
  REGION 1..9: note = short peptide
RGAVPMSTK

SEQ ID NO: 2231 - protein, 12 aa, synthetic construct
  REGION 1..12: note = short peptide
HPGIAEFPSRGK

SEQ ID NO: 2232 - protein, 9 aa, synthetic construct
  REGION 1..9: note = short peptide
SRMKKEVNF

SEQ ID NO: 2233 - protein, 15 aa, synthetic construct
  REGION 1..15: note = short peptide
EEEIAALVIDNGSGM

SEQ ID NO: 2234 - protein, 15 aa, synthetic construct
  REGION 1..15: note = short peptide
EGLTFQMKKNAEELK

SEQ ID NO: 2235 - protein, 9 aa, synthetic construct
  REGION 1..9: note = short peptide
RLFNLTSTF

SEQ ID NO: 2236 - protein, 10 aa, synthetic construct
  REGION 1..10: note = short peptide
DILCAAFLPP

SEQ ID NO: 2237 - protein, 15 aa, synthetic construct
  REGION 1..15: note = short peptide
KGESSGKNVTLPAVF

SEQ ID NO: 2238 - protein, 10 aa, synthetic construct
  REGION 1..10: note = short peptide
KIRQKGFVQK

SEQ ID NO: 2239 - protein, 10 aa, synthetic construct
  REGION 1..10: note = short peptide
DTSMVHELNR

SEQ ID NO: 2240 - protein, 11 aa, synthetic construct
  REGION 1..11: note = short peptide
GSLSYLNVTRK

SEQ ID NO: 2241 - protein, 10 aa, synthetic construct
  REGION 1..10: note = short peptide
RRNGTLPWLR

SEQ ID NO: 2242 - protein, 14 aa, synthetic construct
  REGION 1..14: note = short peptide
AQRTGLEDPERYLF

SEQ ID NO: 2243 - protein, 9 aa, synthetic construct
  REGION 1..9: note = short peptide
SHTNTSHVM

SEQ ID NO: 2244 - protein, 9 aa, synthetic construct
  REGION 1..9: note = short peptide
SESKSGPEY

SEQ ID NO: 2245 - protein, 9 aa, synthetic construct
  REGION 1..9: note = short peptide
SEEIITPVY

SEQ ID NO: 2246 - protein, 11 aa, synthetic construct
  REGION 1..11: note = short peptide
APSLRHSVQQF

SEQ ID NO: 2247 - protein, 13 aa, synthetic construct
  REGION 1..13: note = short peptide
QKKVEELEGEITT

SEQ ID NO: 2248 - protein, 8 aa, synthetic construct
  REGION 1..8: note = short peptide
KPAPPPAP

SEQ ID NO: 2249 - protein, 9 aa, synthetic construct
  REGION 1..9: note = short peptide
SLASAICKV

SEQ ID NO: 2250 - protein, 10 aa, synthetic construct
  REGION 1..10: note = short peptide
NISHVAEGDK

SEQ ID NO: 2251 - protein, 12 aa, synthetic construct
  REGION 1..12: note = short peptide
SIVRVLTARKTV

SEQ ID NO: 2252 - protein, 9 aa, synthetic construct
  REGION 1..9: note = short peptide
PAGLPPPAF

SEQ ID NO: 2253 - protein, 9 aa, synthetic construct
  REGION 1..9: note = short peptide
SGFNKTVLR

SEQ ID NO: 2254 - protein, 10 aa, synthetic construct
  REGION 1..10: note = short peptide
ITDDFVKQKY

SEQ ID NO: 2255 - protein, 15 aa, synthetic construct
  REGION 1..15: note = short peptide
TKRKWEAVHAAEQRR

SEQ ID NO: 2256 - protein, 10 aa, synthetic construct
  REGION 1..10: note = short peptide
AVHCMGILVK

SEQ ID NO: 2257 - protein, 8 aa, synthetic construct
  REGION 1..8: note = short peptide
EGFQKRCL

SEQ ID NO: 2258 - protein, 9 aa, synthetic construct
  REGION 1..9: note = short peptide
DSVFVENCR

SEQ ID NO: 2259 - protein, 11 aa, synthetic construct
  REGION 1..11: note = short peptide
DTSGEHLTCLR

SEQ ID NO: 2260 - protein, 11 aa, synthetic construct
  REGION 1..11: note = short peptide
YFILNSSCLRL

SEQ ID NO: 2261 - protein, 11 aa, synthetic construct
  REGION 1..11: note = short peptide
DSDCGVFVLQY

SEQ ID NO: 2262 - protein, 10 aa, synthetic construct
  REGION 1..10: note = short peptide
VPSKLRLVCL

SEQ ID NO: 2263 - protein, 11 aa, synthetic construct
  REGION 1..11: note = short peptide
DYCTGLKALLY

SEQ ID NO: 2264 - protein, 11 aa, synthetic construct
  REGION 1..11: note = short peptide
FPQNAFICQAL

SEQ ID NO: 2265 - protein, 9 aa, synthetic construct
  REGION 1..9: note = short peptide
CPIKEEIAL

SEQ ID NO: 2266 - protein, 11 aa, synthetic construct
  REGION 1..11: note = short peptide
ETICRVTGGMK

SEQ ID NO: 2267 - protein, 11 aa, synthetic construct
  REGION 1..11: note = short peptide
ETVCSPFTAAR

SEQ ID NO: 2268 - protein, 11 aa, synthetic construct
  REGION 1..11: note = short peptide
EVAGDLEVDCY

SEQ ID NO: 2269 - protein, 9 aa, synthetic construct
  REGION 1..9: note = short peptide
AVVAVVMCR

SEQ ID NO: 2270 - protein, 15 aa, synthetic construct
  REGION 1..15: note = short peptide
EVVRCLSEQSVAISR

SEQ ID NO: 2271 - protein, 9 aa, synthetic construct
  REGION 1..9: note = short peptide
YAECYPATM

SEQ ID NO: 2272 - protein, 9 aa, synthetic construct
  REGION 1..9: note = short peptide
CVNQFIISR

SEQ ID NO: 2273 - protein, 14 aa, synthetic construct
  REGION 1..14: note = short peptide
IPCEKVSTLPAITL

SEQ ID NO: 2274 - protein, 9 aa, synthetic construct
  REGION 1..9: note = short peptide
TPDPQGPEL

SEQ ID NO: 2275 - protein, 9 aa, synthetic construct
  REGION 1..9: note = short peptide
KHCDKAEFF

SEQ ID NO: 2276 - protein, 8 aa, synthetic construct
  REGION 1..8: note = short peptide
QTFGGIKR

SEQ ID NO: 2277 - protein, 11 aa, synthetic construct
  REGION 1..11: note = short peptide
GPCGLRTAIEL

SEQ ID NO: 2278 - protein, 10 aa, synthetic construct
  REGION 1..10: note = short peptide
YPITDVCQIL

SEQ ID NO: 2279 - protein, 12 aa, synthetic construct
  REGION 1..12: note = short peptide
KYINTVVSCLVF

SEQ ID NO: 2280 - protein, 9 aa, synthetic construct
  REGION 1..9: note = short peptide
KYLPCFTFL

SEQ ID NO: 2281 - protein, 9 aa, synthetic construct
  REGION 1..9: note = short peptide
LPARFFSCM

SEQ ID NO: 2282 - protein, 8 aa, synthetic construct
  REGION 1..8: note = short peptide
SGLGLGCY

SEQ ID NO: 2283 - protein, 11 aa, synthetic construct
  REGION 1..11: note = short peptide
LPSLANVSSCL

SEQ ID NO: 2284 - protein, 9 aa, synthetic construct
  REGION 1..9: note = short peptide
LPSPEDCAL

SEQ ID NO: 2285 - protein, 9 aa, synthetic construct
  REGION 1..9: note = short peptide
LVNSKRQCL

SEQ ID NO: 2286 - protein, 9 aa, synthetic construct
  REGION 1..9: note = short peptide
MLILLPVCR

SEQ ID NO: 2287 - protein, 10 aa, synthetic construct
  REGION 1..10: note = short peptide
NPSAQRDACL

SEQ ID NO: 2288 - protein, 12 aa, synthetic construct
  REGION 1..12: note = short peptide
NTEDTGLCRVLY

SEQ ID NO: 2289 - protein, 9 aa, synthetic construct
  REGION 1..9: note = short peptide
GVCTKITQK

SEQ ID NO: 2290 - protein, 9 aa, synthetic construct
  REGION 1..9: note = short peptide
HACTHQISL

SEQ ID NO: 2291 - protein, 9 aa, synthetic construct
  REGION 1..9: note = short peptide
GRHCLRAHF

SEQ ID NO: 2292 - protein, 9 aa, synthetic construct
  REGION 1..9: note = short peptide
GRCHTTHSM

SEQ ID NO: 2293 - protein, 15 aa, synthetic construct
  REGION 1..15: note = short peptide
SNQNGKDSKPSSTPR

SEQ ID NO: 2294 - protein, 9 aa, synthetic construct
  REGION 1..9: note = short peptide
GPQHNRHCL

SEQ ID NO: 2295 - protein, 8 aa, synthetic construct
  REGION 1..8: note = short peptide
ESKTHQCL

SEQ ID NO: 2296 - protein, 12 aa, synthetic construct
  REGION 1..12: note = short peptide
KICEPGYSPTYK

SEQ ID NO: 2297 - protein, 9 aa, synthetic construct
  REGION 1..9: note = short peptide
HAKEILHCL

SEQ ID NO: 2298 - protein, 11 aa, synthetic construct
  REGION 1..11: note = short peptide
KLCEGFNEVLK

SEQ ID NO: 2299 - protein, 9 aa, synthetic construct
  REGION 1..9: note = short peptide
LPCPGKATL

SEQ ID NO: 2300 - protein, 10 aa, synthetic construct
  REGION 1..10: note = short peptide
QTQKEVEVTR

SEQ ID NO: 2301 - protein, 9 aa, synthetic construct
  REGION 1..9: note = short peptide
NFLPPIIAR

SEQ ID NO: 2302 - protein, 11 aa, synthetic construct
  REGION 1..11: note = short peptide
TGASGSFKLNK

SEQ ID NO: 2303 - protein, 15 aa, synthetic construct
  REGION 1..15: note = short peptide
KGESSGKNVTLPAVF

SEQ ID NO: 2304 - protein, 10 aa, synthetic construct
  REGION 1..10: note = short peptide
RRNGTLPWLR

SEQ ID NO: 2305 - protein, 13 aa, synthetic construct
  REGION 1..13: note = short peptide
QKKVEELEGEITT

SEQ ID NO: 2306 - protein, 15 aa, synthetic construct
  REGION 1..15: note = short peptide
TVTPAKAVTTPGKKG

SEQ ID NO: 2307 - protein, 9 aa, synthetic construct
  REGION 1..9: note = short peptide
NPSKTASTL

SEQ ID NO: 2308 - protein, 9 aa, synthetic construct
  REGION 1..9: note = short peptide
RPRPPCAKP

SEQ ID NO: 2309 - protein, 15 aa, synthetic construct
  REGION 1..15: note = short peptide
VEEVQKHSVHTLVFR

SEQ ID NO: 2310 - protein, 10 aa, synthetic construct
  REGION 1..10: note = short peptide
DATGVDINMR

SEQ ID NO: 2311 - protein, 11 aa, synthetic construct
  REGION 1..11: note = short peptide
TVPGLQPLPTL

SEQ ID NO: 2312 - protein, 12 aa, synthetic construct
  REGION 1..12: note = short peptide
SSFGSRSDSRGK

SEQ ID NO: 2313 - protein, 9 aa, synthetic construct
  REGION 1..9: note = short peptide
HAYNRTHLL

SEQ ID NO: 2314 - protein, 9 aa, synthetic construct
  REGION 1..9: note = short peptide
RHFNRTESL

SEQ ID NO: 2315 - protein, 11 aa, synthetic construct
  REGION 1..11: note = short peptide
ARGPKKHLKRV

SEQ ID NO: 2316 - protein, 14 aa, synthetic construct
  REGION 1..14: note = short peptide
YSSRGGYGGGGPGY

SEQ ID NO: 2317 - protein, 11 aa, synthetic construct
  REGION 1..11: note = short peptide
ARGPKKHLKRV

SEQ ID NO: 2318 - protein, 9 aa, synthetic construct
  REGION 1..9: note = short peptide
YTWNHTVFY

SEQ ID NO: 2319 - protein, 9 aa, synthetic construct
  REGION 1..9: note = short peptide
ARTKQTARK

SEQ ID NO: 2320 - protein, 13 aa, synthetic construct
  REGION 1..13: note = short peptide
FTDGITNKLVACY

SEQ ID NO: 2321 - protein, 13 aa, synthetic construct
  REGION 1..13: note = short peptide
FTDGITNKLVACY

SEQ ID NO: 2322 - protein, 9 aa, synthetic construct
  REGION 1..9: note = short peptide
MPSVFQNVL

SEQ ID NO: 2323 - protein, 11 aa, synthetic construct
  REGION 1..11: note = short peptide
MPLPEEVTQIL

SEQ ID NO: 2324 - protein, 9 aa, synthetic construct
  REGION 1..9: note = short peptide
DTIENVKAK

SEQ ID NO: 2325 - protein, 12 aa, synthetic construct
  REGION 1..12: note = short peptide
TAADTAAQITQR

SEQ ID NO: 2326 - protein, 11 aa, synthetic construct
  REGION 1..11: note = short peptide
YPIEHGIVTNW

SEQ ID NO: 2327 - protein, 9 aa, synthetic construct
  REGION 1..9: note = short peptide
LPILRPMVL

SEQ ID NO: 2328 - protein, 9 aa, synthetic construct
  REGION 1..9: note = short peptide
MPTIQITAL

SEQ ID NO: 2329 - protein, 14 aa, synthetic construct
  REGION 1..14: note = short peptide
STRSVSSSSYRRMF

SEQ ID NO: 2330 - protein, 8 aa, synthetic construct
  REGION 1..8: note = short peptide
RGKFAVVR

SEQ ID NO: 2331 - protein, 15 aa, synthetic construct
  REGION 1..15: note = short peptide
VYSRHPAENGKSNFL

SEQ ID NO: 2332 - protein, 8 aa, synthetic construct
  REGION 1..8: note = short peptide
VLPPPPIK

SEQ ID NO: 2333 - protein, 10 aa, synthetic construct
  REGION 1..10: note = short peptide
CCPRLKILRL

SEQ ID NO: 2334 - protein, 9 aa, synthetic construct
  REGION 1..9: note = short peptide
DFPIPVPVI

SEQ ID NO: 2335 - protein, 9 aa, synthetic construct
  REGION 1..9: note = short peptide
HPSPAIVAR

SEQ ID NO: 2336 - protein, 9 aa, synthetic construct
  REGION 1..9: note = short peptide
AINGNGPTK

SEQ ID NO: 2337 - protein, 11 aa, synthetic construct
  REGION 1..11: note = short peptide
MPYQEIKNVIL

SEQ ID NO: 2338 - protein, 9 aa, synthetic construct
  REGION 1..9: note = short peptide
KPTHVNVSV

SEQ ID NO: 2339 - protein, 9 aa, synthetic construct
  REGION 1..9: note = short peptide
ETEKMIEKY

SEQ ID NO: 2340 - protein, 9 aa, synthetic construct
  REGION 1..9: note = short peptide
VPASLPVDF

SEQ ID NO: 2341 - protein, 14 aa, synthetic construct
  REGION 1..14: note = short peptide
AGVLKKTTGLVGLA

SEQ ID NO: 2342 - protein, 10 aa, synthetic construct
  REGION 1..10: note = short peptide
KQCSALQHVK

SEQ ID NO: 2343 - protein, 11 aa, synthetic construct
  REGION 1..11: note = short peptide
DDDIAALVVDN

SEQ ID NO: 2344 - protein, 13 aa, synthetic construct
  REGION 1..13: note = short peptide
TFQKWAAVVVPSG

SEQ ID NO: 2345 - protein, 9 aa, synthetic construct
  REGION 1..9: note = short peptide
SMLKPSGLK

SEQ ID NO: 2346 - protein, 9 aa, synthetic construct
  REGION 1..9: note = short peptide
MPVINYDLL

SEQ ID NO: 2347 - protein, 12 aa, synthetic construct
  REGION 1..12: note = short peptide
GLETEKADVQLF

SEQ ID NO: 2348 - protein, 15 aa, synthetic construct
  REGION 1..15: note = short peptide
NGAPGIAGAPGFPGA

SEQ ID NO: 2349 - protein, 9 aa, synthetic construct
  REGION 1..9: note = short peptide
KIMKDILEK

SEQ ID NO: 2350 - protein, 9 aa, synthetic construct
  REGION 1..9: note = short peptide
SSVLRCGKK

SEQ ID NO: 2351 - protein, 13 aa, synthetic construct
  REGION 1..13: note = short peptide
AGVPLATLCSNLY

SEQ ID NO: 2352 - protein, 8 aa, synthetic construct
  REGION 1..8: note = short peptide
LPGPAPCL

SEQ ID NO: 2353 - protein, 9 aa, synthetic construct
  REGION 1..9: note = short peptide
QLCGRFVQK

SEQ ID NO: 2354 - protein, 9 aa, synthetic construct
  REGION 1..9: note = short peptide
YYLPCPEIF

SEQ ID NO: 2355 - protein, 10 aa, synthetic construct
  REGION 1..10: note = short peptide
RQKAVSLFLC

SEQ ID NO: 2356 - protein, 10 aa, synthetic construct
  REGION 1..10: note = short peptide
DLASLGCISR

SEQ ID NO: 2357 - protein, 8 aa, synthetic construct
  REGION 1..8: note = short peptide
VHLSNGPG

SEQ ID NO: 2358 - protein, 12 aa, synthetic construct
  REGION 1..12: note = short peptide
DAVNIVCHSKTR

SEQ ID NO: 2359 - protein, 11 aa, synthetic construct
  REGION 1..11: note = short peptide
DSDCGAFVLQY

SEQ ID NO: 2360 - protein, 10 aa, synthetic construct
  REGION 1..10: note = short peptide
KYLPVGCVTF

SEQ ID NO: 2361 - protein, 9 aa, synthetic construct
  REGION 1..9: note = short peptide
SVAKCQLMK

SEQ ID NO: 2362 - protein, 10 aa, synthetic construct
  REGION 1..10: note = short peptide
KVNLCRPFPK

SEQ ID NO: 2363 - protein, 10 aa, synthetic construct
  REGION 1..10: note = short peptide
YPITDVCQIL

SEQ ID NO: 2364 - protein, 9 aa, synthetic construct
  REGION 1..9: note = short peptide
QRKNICQFL

SEQ ID NO: 2365 - protein, 10 aa, synthetic construct
  REGION 1..10: note = short peptide
FSECGELFRY

SEQ ID NO: 2366 - protein, 11 aa, synthetic construct
  REGION 1..11: note = short peptide
QPISVDWCFVR

SEQ ID NO: 2367 - protein, 9 aa, synthetic construct
  REGION 1..9: note = short peptide
LPTDAVDCM

SEQ ID NO: 2368 - protein, 12 aa, synthetic construct
  REGION 1..12: note = short peptide
MTACGLARDAPR

SEQ ID NO: 2369 - protein, 12 aa, synthetic construct
  REGION 1..12: note = short peptide
NTEDTGLCRVLY

SEQ ID NO: 2370 - protein, 9 aa, synthetic construct
  REGION 1..9: note = short peptide
TVWCLPVLR

SEQ ID NO: 2371 - protein, 9 aa, synthetic construct
  REGION 1..9: note = short peptide
TVWCLPVLR

SEQ ID NO: 2372 - protein, 9 aa, synthetic construct
  REGION 1..9: note = short peptide
VYDCVKLTF

SEQ ID NO: 2373 - protein, 9 aa, synthetic construct
  REGION 1..9: note = short peptide
NLIGCIIGR

SEQ ID NO: 2374 - protein, 12 aa, synthetic construct
  REGION 1..12: note = short peptide
VYADTCFSTIKL

SEQ ID NO: 2375 - protein, 11 aa, synthetic construct
  REGION 1..11: note = short peptide
CSDKMSLLLVY

SEQ ID NO: 2376 - protein, 9 aa, synthetic construct
  REGION 1..9: note = short peptide
LPTDAVDCM

SEQ ID NO: 2377 - protein, 9 aa, synthetic construct
  REGION 1..9: note = short peptide
RSCSKTVTK

SEQ ID NO: 2378 - protein, 11 aa, synthetic construct
  REGION 1..11: note = short peptide
MPEPASRCLLL

SEQ ID NO: 2379 - protein, 9 aa, synthetic construct
  REGION 1..9: note = short peptide
GRHCGALRV

SEQ ID NO: 2380 - protein, 9 aa, synthetic construct
  REGION 1..9: note = short peptide
SPHGEPFCL

SEQ ID NO: 2381 - protein, 11 aa, synthetic construct
  REGION 1..11: note = short peptide
LTDLHYCFNVY

SEQ ID NO: 2382 - protein, 13 aa, synthetic construct
  REGION 1..13: note = short peptide
LSEDSTLTCMQHY

SEQ ID NO: 2383 - protein, 9 aa, synthetic construct
  REGION 1..9: note = short peptide
LPVDFVECL

SEQ ID NO: 2384 - protein, 14 aa, synthetic construct
  REGION 1..14: note = short peptide
GVLRIQNLDQSCQG

SEQ ID NO: 2385 - protein, 9 aa, synthetic construct
  REGION 1..9: note = short peptide
EIVECILKR

SEQ ID NO: 2386 - protein, 8 aa, synthetic construct
  REGION 1..8: note = short peptide
KGNSLVSV

SEQ ID NO: 2387 - protein, 11 aa, synthetic construct
  REGION 1..11: note = short peptide
RVYPYLCRALK

SEQ ID NO: 2388 - protein, 9 aa, synthetic construct
  REGION 1..9: note = short peptide
TLDQVAAGA

SEQ ID NO: 2389 - protein, 8 aa, synthetic construct
  REGION 1..8: note = short peptide
IYSQCQRY

SEQ ID NO: 2390 - protein, 9 aa, synthetic construct
  REGION 1..9: note = short peptide
IPVNVRFCL

SEQ ID NO: 2391 - protein, 9 aa, synthetic construct
  REGION 1..9: note = short peptide
TRWCNEHLK

SEQ ID NO: 2392 - protein, 15 aa, synthetic construct
  REGION 1..15: note = short peptide
IPCEKVSTLPAITLK

SEQ ID NO: 2393 - protein, 11 aa, synthetic construct
  REGION 1..11: note = short peptide
APKDAGIYGCL

SEQ ID NO: 2394 - protein, 9 aa, synthetic construct
  REGION 1..9: note = short peptide
IINVKILCH

SEQ ID NO: 2395 - protein, 9 aa, synthetic construct
  REGION 1..9: note = short peptide
FPIETVVCL

SEQ ID NO: 2396 - protein, 10 aa, synthetic construct
  REGION 1..10: note = short peptide
HPVHVDNCIL

SEQ ID NO: 2397 - protein, 8 aa, synthetic construct
  REGION 1..8: note = short peptide
ANIKVTFI

SEQ ID NO: 2398 - protein, 10 aa, synthetic construct
  REGION 1..10: note = short peptide
KRYCGKTTSR

SEQ ID NO: 2399 - protein, 11 aa, synthetic construct
  REGION 1..11: note = short peptide
AVCDLLSIVCK

SEQ ID NO: 2400 - protein, 10 aa, synthetic construct
  REGION 1..10: note = short peptide
KLPSSPLGCR

SEQ ID NO: 2401 - protein, 9 aa, synthetic construct
  REGION 1..9: note = short peptide
TGLLKGQGL

SEQ ID NO: 2402 - protein, 9 aa, synthetic construct
  REGION 1..9: note = short peptide
YGNGFGGFG

SEQ ID NO: 2403 - protein, 12 aa, synthetic construct
  REGION 1..12: note = short peptide
NVGGKVIHLVER

SEQ ID NO: 2404 - protein, 10 aa, synthetic construct
  REGION 1..10: note = short peptide
CTANDANTKY

SEQ ID NO: 2405 - protein, 12 aa, synthetic construct
  REGION 1..12: note = short peptide
QVHGGLMGIIQR

SEQ ID NO: 2406 - protein, 11 aa, synthetic construct
  REGION 1..11: note = short peptide
QVKRPGDVNVR

SEQ ID NO: 2407 - protein, 11 aa, synthetic construct
  REGION 1..11: note = short peptide
RTACERAKRTL

SEQ ID NO: 2408 - protein, 11 aa, synthetic construct
  REGION 1..11: note = short peptide
TVPGLQPLPTL

SEQ ID NO: 2409 - protein, 13 aa, synthetic construct
  REGION 1..13: note = short peptide
FTDGITNKLVACY

SEQ ID NO: 2410 - protein, 13 aa, synthetic construct
  REGION 1..13: note = short peptide
FTDGITNKLVACY

SEQ ID NO: 2411 - protein, 15 aa, synthetic construct
  REGION 1..15: note = short peptide
NGAPGIAGAPGFPGA

SEQ ID NO: 2412 - protein, 11 aa, synthetic construct
  REGION 1..11: note = short peptide
AVCDLLSIVCK

SEQ ID NO: 2413 - protein, 11 aa, synthetic construct
  REGION 1..11: note = short peptide
AVCDLLSIVCK

SEQ ID NO: 2414 - protein, 12 aa, synthetic construct
  REGION 1..12: note = short peptide
HCIDPNDSKHKR

SEQ ID NO: 2415 - protein, 10 aa, synthetic construct
  REGION 1..10: note = short peptide
SSKVSRDTLY

SEQ ID NO: 2416 - protein, 8 aa, synthetic construct
  REGION 1..8: note = short peptide
PVYPQPPF

SEQ ID NO: 2417 - protein, 14 aa, synthetic construct
  REGION 1..14: note = short peptide
NYRGGFNRSGGGGY

SEQ ID NO: 2418 - protein, 9 aa, synthetic construct
  REGION 1..9: note = short peptide
RSPSPKTSL

SEQ ID NO: 2419 - protein, 9 aa, synthetic construct
  REGION 1..9: note = short peptide
QPDGEPAAL

SEQ ID NO: 2420 - protein, 9 aa, synthetic construct
  REGION 1..9: note = short peptide
SCLLPGLAI

SEQ ID NO: 2421 - protein, 9 aa, synthetic construct
  REGION 1..9: note = short peptide
SPGAARAAA

SEQ ID NO: 2422 - protein, 9 aa, synthetic construct
  REGION 1..9: note = short peptide
KAGERISQK

SEQ ID NO: 2423 - protein, 10 aa, synthetic construct
  REGION 1..10: note = short peptide
HPLNLTKQQL

SEQ ID NO: 2424 - protein, 9 aa, synthetic construct
  REGION 1..9: note = short peptide
FDHPNIIRL

SEQ ID NO: 2425 - protein, 9 aa, synthetic construct
  REGION 1..9: note = short peptide
QPQPNVSEL

SEQ ID NO: 2426 - protein, 10 aa, synthetic construct
  REGION 1..10: note = short peptide
FPFYGKPMRI

SEQ ID NO: 2427 - protein, 9 aa, synthetic construct
  REGION 1..9: note = short peptide
FPLDLDVKM

SEQ ID NO: 2428 - protein, 12 aa, synthetic construct
  REGION 1..12: note = short peptide
GEPGNIGFPGPK

SEQ ID NO: 2429 - protein, 11 aa, synthetic construct
  REGION 1..11: note = short peptide
GPCGLRTAIDL

SEQ ID NO: 2430 - protein, 9 aa, synthetic construct
  REGION 1..9: note = short peptide
HPFFKDMSL

SEQ ID NO: 2431 - protein, 9 aa, synthetic construct
  REGION 1..9: note = short peptide
EVVDLLLAR

SEQ ID NO: 2432 - protein, 8 aa, synthetic construct
  REGION 1..8: note = short peptide
HPKYKTEL

SEQ ID NO: 2433 - protein, 9 aa, synthetic construct
  REGION 1..9: note = short peptide
HNNDTFHFL

SEQ ID NO: 2434 - protein, 8 aa, synthetic construct
  REGION 1..8: note = short peptide
HAGSMHRE

SEQ ID NO: 2435 - protein, 15 aa, synthetic construct
  REGION 1..15: note = short peptide
DLQKKLVPFATELHE

SEQ ID NO: 2436 - protein, 12 aa, synthetic construct
  REGION 1..12: note = short peptide
TVITVDTKAAGK

SEQ ID NO: 2437 - protein, 9 aa, synthetic construct
  REGION 1..9: note = short peptide
YPYNNSQRL

SEQ ID NO: 2438 - protein, 9 aa, synthetic construct
  REGION 1..9: note = short peptide
VFNETKNLL

SEQ ID NO: 2439 - protein, 11 aa, synthetic construct
  REGION 1..11: note = short peptide
MPEHVLTSESM

SEQ ID NO: 2440 - protein, 9 aa, synthetic construct
  REGION 1..9: note = short peptide
DHAHVKPLL

SEQ ID NO: 2441 - protein, 12 aa, synthetic construct
  REGION 1..12: note = short peptide
YPIRSAYPQQNL

SEQ ID NO: 2442 - protein, 10 aa, synthetic construct
  REGION 1..10: note = short peptide
LGGPAIVHAL

SEQ ID NO: 2443 - protein, 13 aa, synthetic construct
  REGION 1..13: note = short peptide
APRMPFSIGQVTM

SEQ ID NO: 2444 - protein, 11 aa, synthetic construct
  REGION 1..11: note = short peptide
MPIHQNLKELL

SEQ ID NO: 2445 - protein, 8 aa, synthetic construct
  REGION 1..8: note = short peptide
TCGGGVQY

SEQ ID NO: 2446 - protein, 9 aa, synthetic construct
  REGION 1..9: note = short peptide
MPFFPTPRY

SEQ ID NO: 2447 - protein, 9 aa, synthetic construct
  REGION 1..9: note = short peptide
TATEVDIKM

SEQ ID NO: 2448 - protein, 9 aa, synthetic construct
  REGION 1..9: note = short peptide
MPETTETVL

SEQ ID NO: 2449 - protein, 10 aa, synthetic construct
  REGION 1..10: note = short peptide
APGGGRGALL

SEQ ID NO: 2450 - protein, 11 aa, synthetic construct
  REGION 1..11: note = short peptide
AVRPPAAAAAK

SEQ ID NO: 2451 - protein, 10 aa, synthetic construct
  REGION 1..10: note = short peptide
KQLATKAARK

SEQ ID NO: 2452 - protein, 10 aa, synthetic construct
  REGION 1..10: note = short peptide
KRVSEQFTAM

SEQ ID NO: 2453 - protein, 11 aa, synthetic construct
  REGION 1..11: note = short peptide
KRVSEQFTAMF

SEQ ID NO: 2454 - protein, 10 aa, synthetic construct
  REGION 1..10: note = short peptide
TIAGSRPGGI

SEQ ID NO: 2455 - protein, 9 aa, synthetic construct
  REGION 1..9: note = short peptide
KQKLKGGPK

SEQ ID NO: 2456 - protein, 12 aa, synthetic construct
  REGION 1..12: note = short peptide
DVSNPQTVGVGR

SEQ ID NO: 2457 - protein, 9 aa, synthetic construct
  REGION 1..9: note = short peptide
ASFDKAKLK

SEQ ID NO: 2458 - protein, 10 aa, synthetic construct
  REGION 1..10: note = short peptide
KTFPGFFSPM

SEQ ID NO: 2459 - protein, 9 aa, synthetic construct
  REGION 1..9: note = short peptide
HRKGFDCRF

SEQ ID NO: 2460 - protein, 10 aa, synthetic construct
  REGION 1..10: note = short peptide
TFLPNDCLLY

SEQ ID NO: 2461 - protein, 10 aa, synthetic construct
  REGION 1..10: note = short peptide
VPHTGRYTCL

SEQ ID NO: 2462 - protein, 10 aa, synthetic construct
  REGION 1..10: note = short peptide
HPCAHPWLKL

SEQ ID NO: 2463 - protein, 11 aa, synthetic construct
  REGION 1..11: note = short peptide
CVNKTNKNVKR

SEQ ID NO: 2464 - protein, 13 aa, synthetic construct
  REGION 1..13: note = short peptide
CVIGSHAVNGVAR

SEQ ID NO: 2465 - protein, 9 aa, synthetic construct
  REGION 1..9: note = short peptide
HASQFSTCL

SEQ ID NO: 2466 - protein, 9 aa, synthetic construct
  REGION 1..9: note = short peptide
CIISLVTQR

SEQ ID NO: 2467 - protein, 9 aa, synthetic construct
  REGION 1..9: note = short peptide
MPVNDDLCF

SEQ ID NO: 2468 - protein, 9 aa, synthetic construct
  REGION 1..9: note = short peptide
CTIPTVVGR

SEQ ID NO: 2469 - protein, 9 aa, synthetic construct
  REGION 1..9: note = short peptide
SLISNGPSL

SEQ ID NO: 2470 - protein, 12 aa, synthetic construct
  REGION 1..12: note = short peptide
NSEQSYNKSFCY

SEQ ID NO: 2471 - protein, 9 aa, synthetic construct
  REGION 1..9: note = short peptide
FPKKKCFVF

SEQ ID NO: 2472 - protein, 9 aa, synthetic construct
  REGION 1..9: note = short peptide
DTIARLPCL

SEQ ID NO: 2473 - protein, 10 aa, synthetic construct
  REGION 1..10: note = short peptide
KRLCEIFTRM

SEQ ID NO: 2474 - protein, 8 aa, synthetic construct
  REGION 1..8: note = short peptide
IEKVKCIL

SEQ ID NO: 2475 - protein, 10 aa, synthetic construct
  REGION 1..10: note = short peptide
SYIKLGCLQF

SEQ ID NO: 2476 - protein, 9 aa, synthetic construct
  REGION 1..9: note = short peptide
DVSDLSLCK

SEQ ID NO: 2477 - protein, 10 aa, synthetic construct
  REGION 1..10: note = short peptide
HRKTCTTVAF

SEQ ID NO: 2478 - protein, 11 aa, synthetic construct
  REGION 1..11: note = short peptide
PYACKLLFQEL

SEQ ID NO: 2479 - protein, 10 aa, synthetic construct
  REGION 1..10: note = short peptide
LASLGCISRY

SEQ ID NO: 2480 - protein, 11 aa, synthetic construct
  REGION 1..11: note = short peptide
LTECPEIEICY

SEQ ID NO: 2481 - protein, 8 aa, synthetic construct
  REGION 1..8: note = short peptide
LKGPILCF

SEQ ID NO: 2482 - protein, 11 aa, synthetic construct
  REGION 1..11: note = short peptide
ESAPGCGVWQR

SEQ ID NO: 2483 - protein, 9 aa, synthetic construct
  REGION 1..9: note = short peptide
LLTDFCTHL

SEQ ID NO: 2484 - protein, 10 aa, synthetic construct
  REGION 1..10: note = short peptide
ESCGIHETTF

SEQ ID NO: 2485 - protein, 9 aa, synthetic construct
  REGION 1..9: note = short peptide
KYMDIQFDF

SEQ ID NO: 2486 - protein, 11 aa, synthetic construct
  REGION 1..11: note = short peptide
SSDQCAVQLFY

SEQ ID NO: 2487 - protein, 11 aa, synthetic construct
  REGION 1..11: note = short peptide
ESMELACPAER

SEQ ID NO: 2488 - protein, 9 aa, synthetic construct
  REGION 1..9: note = short peptide
FPVQLFVPQ

SEQ ID NO: 2489 - protein, 9 aa, synthetic construct
  REGION 1..9: note = short peptide
DIAIPCNNK

SEQ ID NO: 2490 - protein, 9 aa, synthetic construct
  REGION 1..9: note = short peptide
RRDCGGRIL

SEQ ID NO: 2491 - protein, 9 aa, synthetic construct
  REGION 1..9: note = short peptide
CIDPLIYYY

SEQ ID NO: 2492 - protein, 8 aa, synthetic construct
  REGION 1..8: note = short peptide
EIGPSICR

SEQ ID NO: 2493 - protein, 12 aa, synthetic construct
  REGION 1..12: note = short peptide
EAKEGDCGDILR

SEQ ID NO: 2494 - protein, 10 aa, synthetic construct
  REGION 1..10: note = short peptide
EVEGTCTGKY

SEQ ID NO: 2495 - protein, 13 aa, synthetic construct
  REGION 1..13: note = short peptide
LPYDDCVFGGQRL

SEQ ID NO: 2496 - protein, 9 aa, synthetic construct
  REGION 1..9: note = short peptide
GRHRFCFLR

SEQ ID NO: 2497 - protein, 8 aa, synthetic construct
  REGION 1..8: note = short peptide
DALKTCSV

SEQ ID NO: 2498 - protein, 10 aa, synthetic construct
  REGION 1..10: note = short peptide
DTACVGPTLR

SEQ ID NO: 2499 - protein, 10 aa, synthetic construct
  REGION 1..10: note = short peptide
VPHTGRYTCL

SEQ ID NO: 2500 - protein, 8 aa, synthetic construct
  REGION 1..8: note = short peptide
IYIDASCL

SEQ ID NO: 2501 - protein, 11 aa, synthetic construct
  REGION 1..11: note = short peptide
TLPNRFVITPR

SEQ ID NO: 2502 - protein, 11 aa, synthetic construct
  REGION 1..11: note = short peptide
YHHPGCGGTTL

SEQ ID NO: 2503 - protein, 8 aa, synthetic construct
  REGION 1..8: note = short peptide
ANHYSQQM

SEQ ID NO: 2504 - protein, 8 aa, synthetic construct
  REGION 1..8: note = short peptide
YPVCVSKV

SEQ ID NO: 2505 - protein, 8 aa, synthetic construct
  REGION 1..8: note = short peptide
ANHYSQQM

SEQ ID NO: 2506 - protein, 9 aa, synthetic construct
  REGION 1..9: note = short peptide
ARVGACILK

SEQ ID NO: 2507 - protein, 9 aa, synthetic construct
  REGION 1..9: note = short peptide
NVVITVTQR

SEQ ID NO: 2508 - protein, 13 aa, synthetic construct
  REGION 1..13: note = short peptide
FSAQPHVNGGPLY

SEQ ID NO: 2509 - protein, 9 aa, synthetic construct
  REGION 1..9: note = short peptide
HGTHITCKR

SEQ ID NO: 2510 - protein, 9 aa, synthetic construct
  REGION 1..9: note = short peptide
GVFCKGLSR

SEQ ID NO: 2511 - protein, 10 aa, synthetic construct
  REGION 1..10: note = short peptide
NMKKREGTQL

SEQ ID NO: 2512 - protein, 12 aa, synthetic construct
  REGION 1..12: note = short peptide
HCIDPNDSKHKR

SEQ ID NO: 2513 - protein, 12 aa, synthetic construct
  REGION 1..12: note = short peptide
GEPGNIGFPGPK

SEQ ID NO: 2514 - protein, 11 aa, synthetic construct
  REGION 1..11: note = short peptide
GPCGLRTAIDL

SEQ ID NO: 2515 - protein, 8 aa, synthetic construct
  REGION 1..8: note = short peptide
HAGSMHRE

SEQ ID NO: 2516 - protein, 9 aa, synthetic construct
  REGION 1..9: note = short peptide
DHAHVKPLL

SEQ ID NO: 2517 - protein, 8 aa, synthetic construct
  REGION 1..8: note = short peptide
TCGGGVQY

SEQ ID NO: 2518 - protein, 8 aa, synthetic construct
  REGION 1..8: note = short peptide
VIKNKTWK

SEQ ID NO: 2519 - protein, 9 aa, synthetic construct
  REGION 1..9: note = short peptide
GIMKKAYEL

SEQ ID NO: 2520 - protein, 13 aa, synthetic construct
  REGION 1..13: note = short peptide
MKPVPDLVPGNFK

SEQ ID NO: 2521 - protein, 10 aa, synthetic construct
  REGION 1..10: note = short peptide
ALFTHKMVHK

SEQ ID NO: 2522 - protein, 9 aa, synthetic construct
  REGION 1..9: note = short peptide
ALATLTQMR

SEQ ID NO: 2523 - protein, 8 aa, synthetic construct
  REGION 1..8: note = short peptide
KKNRVTVY

SEQ ID NO: 2524 - protein, 13 aa, synthetic construct
  REGION 1..13: note = short peptide
TENSTSAPAAKPK

SEQ ID NO: 2525 - protein, 13 aa, synthetic construct
  REGION 1..13: note = short peptide
TENSTSAPAAKPK

SEQ ID NO: 2526 - protein, 10 aa, synthetic construct
  REGION 1..10: note = short peptide
QPVDNSTISL

SEQ ID NO: 2527 - protein, 10 aa, synthetic construct
  REGION 1..10: note = short peptide
ETIPLTAEKL

SEQ ID NO: 2528 - protein, 11 aa, synthetic construct
  REGION 1..11: note = short peptide
DAVPCSTTINR

SEQ ID NO: 2529 - protein, 13 aa, synthetic construct
  REGION 1..13: note = short peptide
ETRPAGDGTFQKW

SEQ ID NO: 2530 - protein, 8 aa, synthetic construct
  REGION 1..8: note = short peptide
KPRPPLHL

SEQ ID NO: 2531 - protein, 9 aa, synthetic construct
  REGION 1..9: note = short peptide
TGGKAPRKQ

SEQ ID NO: 2532 - protein, 12 aa, synthetic construct
  REGION 1..12: note = short peptide
IPAPANSTKLIL

SEQ ID NO: 2533 - protein, 12 aa, synthetic construct
  REGION 1..12: note = short peptide
SEEIITPVYCTG

SEQ ID NO: 2534 - protein, 10 aa, synthetic construct
  REGION 1..10: note = short peptide
TTNVTAHAAY

SEQ ID NO: 2535 - protein, 9 aa, synthetic construct
  REGION 1..9: note = short peptide
SIEYDSEPF

SEQ ID NO: 2536 - protein, 10 aa, synthetic construct
  REGION 1..10: note = short peptide
LPRPPMLLAL

SEQ ID NO: 2537 - protein, 13 aa, synthetic construct
  REGION 1..13: note = short peptide
ARKSAPSTGGVKK

SEQ ID NO: 2538 - protein, 15 aa, synthetic construct
  REGION 1..15: note = short peptide
IRLQHHRIAQCRTVK

SEQ ID NO: 2539 - protein, 9 aa, synthetic construct
  REGION 1..9: note = short peptide
TSVLLPTDI

SEQ ID NO: 2540 - protein, 10 aa, synthetic construct
  REGION 1..10: note = short peptide
FPEEISSMVL

SEQ ID NO: 2541 - protein, 8 aa, synthetic construct
  REGION 1..8: note = short peptide
SGLGRLFG

SEQ ID NO: 2542 - protein, 10 aa, synthetic construct
  REGION 1..10: note = short peptide
FPLTERNWSL

SEQ ID NO: 2543 - protein, 9 aa, synthetic construct
  REGION 1..9: note = short peptide
KMDESKHEI

SEQ ID NO: 2544 - protein, 13 aa, synthetic construct
  REGION 1..13: note = short peptide
APRMPFSIGQVTM

SEQ ID NO: 2545 - protein, 9 aa, synthetic construct
  REGION 1..9: note = short peptide
LGLTGLLSK

SEQ ID NO: 2546 - protein, 8 aa, synthetic construct
  REGION 1..8: note = short peptide
QGAAAGGY

SEQ ID NO: 2547 - protein, 14 aa, synthetic construct
  REGION 1..14: note = short peptide
AVSVTPIRDTKWLT

SEQ ID NO: 2548 - protein, 9 aa, synthetic construct
  REGION 1..9: note = short peptide
RYVQPMASF

SEQ ID NO: 2549 - protein, 11 aa, synthetic construct
  REGION 1..11: note = short peptide
ESAPEGQAQQR

SEQ ID NO: 2550 - protein, 9 aa, synthetic construct
  REGION 1..9: note = short peptide
AVNKGLTLL

SEQ ID NO: 2551 - protein, 11 aa, synthetic construct
  REGION 1..11: note = short peptide
QAGPRALAVQR

SEQ ID NO: 2552 - protein, 14 aa, synthetic construct
  REGION 1..14: note = short peptide
FIYGYPKKGHGHSY

SEQ ID NO: 2553 - protein, 11 aa, synthetic construct
  REGION 1..11: note = short peptide
APRKQLATKAA

SEQ ID NO: 2554 - protein, 15 aa, synthetic construct
  REGION 1..15: note = short peptide
FKRGADPGMPEPTVL

SEQ ID NO: 2555 - protein, 11 aa, synthetic construct
  REGION 1..11: note = short peptide
LYPEWTEAQRL

SEQ ID NO: 2556 - protein, 9 aa, synthetic construct
  REGION 1..9: note = short peptide
NVNDTFHKR

SEQ ID NO: 2557 - protein, 12 aa, synthetic construct
  REGION 1..12: note = short peptide
SSHKTFRIKRFL

SEQ ID NO: 2558 - protein, 10 aa, synthetic construct
  REGION 1..10: note = short peptide
SVFQQGMKNK

SEQ ID NO: 2559 - protein, 12 aa, synthetic construct
  REGION 1..12: note = short peptide
SSHKTFRIKRFL

SEQ ID NO: 2560 - protein, 8 aa, synthetic construct
  REGION 1..8: note = short peptide
YEKLKTDI

SEQ ID NO: 2561 - protein, 14 aa, synthetic construct
  REGION 1..14: note = short peptide
RRKDHLKDHQNGSM

SEQ ID NO: 2562 - protein, 9 aa, synthetic construct
  REGION 1..9: note = short peptide
DVHKKYNAL

SEQ ID NO: 2563 - protein, 9 aa, synthetic construct
  REGION 1..9: note = short peptide
TAIKGVGRR

SEQ ID NO: 2564 - protein, 11 aa, synthetic construct
  REGION 1..11: note = short peptide
VVYPWTQRFFD

SEQ ID NO: 2565 - protein, 9 aa, synthetic construct
  REGION 1..9: note = short peptide
STINYKWSF

SEQ ID NO: 2566 - protein, 9 aa, synthetic construct
  REGION 1..9: note = short peptide
EHYKNSTVM

SEQ ID NO: 2567 - protein, 11 aa, synthetic construct
  REGION 1..11: note = short peptide
MPGTTDTIQVL

SEQ ID NO: 2568 - protein, 11 aa, synthetic construct
  REGION 1..11: note = short peptide
REYQDLLNVKM

SEQ ID NO: 2569 - protein, 9 aa, synthetic construct
  REGION 1..9: note = short peptide
SYRDSYDSY

SEQ ID NO: 2570 - protein, 9 aa, synthetic construct
  REGION 1..9: note = short peptide
YMNGTMSQV

SEQ ID NO: 2571 - protein, 11 aa, synthetic construct
  REGION 1..11: note = short peptide
SRQVVRSSKFR

SEQ ID NO: 2572 - protein, 9 aa, synthetic construct
  REGION 1..9: note = short peptide
YMNGTMSQV

SEQ ID NO: 2573 - protein, 10 aa, synthetic construct
  REGION 1..10: note = short peptide
ADAASQVLLG

SEQ ID NO: 2574 - protein, 10 aa, synthetic construct
  REGION 1..10: note = short peptide
YLYDLNHTLY

SEQ ID NO: 2575 - protein, 9 aa, synthetic construct
  REGION 1..9: note = short peptide
RGAPPPGMM

SEQ ID NO: 2576 - protein, 11 aa, synthetic construct
  REGION 1..11: note = short peptide
KSAPATGGVKK

SEQ ID NO: 2577 - protein, 11 aa, synthetic construct
  REGION 1..11: note = short peptide
KSAPATGGVKK

SEQ ID NO: 2578 - protein, 11 aa, synthetic construct
  REGION 1..11: note = short peptide
KSAPSTGGVKK

SEQ ID NO: 2579 - protein, 8 aa, synthetic construct
  REGION 1..8: note = short peptide
SRGISDNY

SEQ ID NO: 2580 - protein, 15 aa, synthetic construct
  REGION 1..15: note = short peptide
SYDRAITVFSPDGHL

SEQ ID NO: 2581 - protein, 9 aa, synthetic construct
  REGION 1..9: note = short peptide
HAAAPDPKC

SEQ ID NO: 2582 - protein, 9 aa, synthetic construct
  REGION 1..9: note = short peptide
HPRQAAPQM

SEQ ID NO: 2583 - protein, 11 aa, synthetic construct
  REGION 1..11: note = short peptide
MPDPVVPPVSL

SEQ ID NO: 2584 - protein, 15 aa, synthetic construct
  REGION 1..15: note = short peptide
RSWTAADMAAQITKR

SEQ ID NO: 2585 - protein, 15 aa, synthetic construct
  REGION 1..15: note = short peptide
AFKDTGKTPVEPEVA

SEQ ID NO: 2586 - protein, 9 aa, synthetic construct
  REGION 1..9: note = short peptide
QSAPANASL

SEQ ID NO: 2587 - protein, 8 aa, synthetic construct
  REGION 1..8: note = short peptide
KGKQSISK

SEQ ID NO: 2588 - protein, 9 aa, synthetic construct
  REGION 1..9: note = short peptide
NVACLINER

SEQ ID NO: 2589 - protein, 9 aa, synthetic construct
  REGION 1..9: note = short peptide
GRTCIVIAH

SEQ ID NO: 2590 - protein, 10 aa, synthetic construct
  REGION 1..10: note = short peptide
TWACSHSMRY

SEQ ID NO: 2591 - protein, 11 aa, synthetic construct
  REGION 1..11: note = short peptide
CVLNEGMPIYR

SEQ ID NO: 2592 - protein, 9 aa, synthetic construct
  REGION 1..9: note = short peptide
CVFAIATKR

SEQ ID NO: 2593 - protein, 10 aa, synthetic construct
  REGION 1..10: note = short peptide
RRGEFCIAKF

SEQ ID NO: 2594 - protein, 9 aa, synthetic construct
  REGION 1..9: note = short peptide
ARCSLVNVH

SEQ ID NO: 2595 - protein, 11 aa, synthetic construct
  REGION 1..11: note = short peptide
GVCGYLFLPWK

SEQ ID NO: 2596 - protein, 9 aa, synthetic construct
  REGION 1..9: note = short peptide
SLIEIICSR

SEQ ID NO: 2597 - protein, 9 aa, synthetic construct
  REGION 1..9: note = short peptide
MPADAPLCL

SEQ ID NO: 2598 - protein, 12 aa, synthetic construct
  REGION 1..12: note = short peptide
HTVGDGLTCRAR

SEQ ID NO: 2599 - protein, 10 aa, synthetic construct
  REGION 1..10: note = short peptide
HRFLSKCKFY

SEQ ID NO: 2600 - protein, 10 aa, synthetic construct
  REGION 1..10: note = short peptide
HPYGCRVIQR

SEQ ID NO: 2601 - protein, 9 aa, synthetic construct
  REGION 1..9: note = short peptide
HPACLVLVL

SEQ ID NO: 2602 - protein, 8 aa, synthetic construct
  REGION 1..8: note = short peptide
TTDCLQIL

SEQ ID NO: 2603 - protein, 13 aa, synthetic construct
  REGION 1..13: note = short peptide
NLFPAACTGAHER

SEQ ID NO: 2604 - protein, 9 aa, synthetic construct
  REGION 1..9: note = short peptide
NLIGCIIGR

SEQ ID NO: 2605 - protein, 13 aa, synthetic construct
  REGION 1..13: note = short peptide
YTDFPCQYVKDTY

SEQ ID NO: 2606 - protein, 11 aa, synthetic construct
  REGION 1..11: note = short peptide
GLIPAEKCTGK

SEQ ID NO: 2607 - protein, 10 aa, synthetic construct
  REGION 1..10: note = short peptide
FSEHNCQPYY

SEQ ID NO: 2608 - protein, 9 aa, synthetic construct
  REGION 1..9: note = short peptide
VPFSQPVCF

SEQ ID NO: 2609 - protein, 9 aa, synthetic construct
  REGION 1..9: note = short peptide
RPKFSVCVL

SEQ ID NO: 2610 - protein, 9 aa, synthetic construct
  REGION 1..9: note = short peptide
DLLLKCLTF

SEQ ID NO: 2611 - protein, 9 aa, synthetic construct
  REGION 1..9: note = short peptide
DLSVCVVGR

SEQ ID NO: 2612 - protein, 9 aa, synthetic construct
  REGION 1..9: note = short peptide
AATCNHTVM

SEQ ID NO: 2613 - protein, 11 aa, synthetic construct
  REGION 1..11: note = short peptide
SAAHILGEVCR

SEQ ID NO: 2614 - protein, 11 aa, synthetic construct
  REGION 1..11: note = short peptide
DSDCGAFVLQY

SEQ ID NO: 2615 - protein, 11 aa, synthetic construct
  REGION 1..11: note = short peptide
DSDCGVFVLQY

SEQ ID NO: 2616 - protein, 10 aa, synthetic construct
  REGION 1..10: note = short peptide
DTACIGPTLR

SEQ ID NO: 2617 - protein, 10 aa, synthetic construct
  REGION 1..10: note = short peptide
DTACVGPTLR

SEQ ID NO: 2618 - protein, 10 aa, synthetic construct
  REGION 1..10: note = short peptide
DVIGDEICCW

SEQ ID NO: 2619 - protein, 13 aa, synthetic construct
  REGION 1..13: note = short peptide
RLASSVLRCGKKK

SEQ ID NO: 2620 - protein, 9 aa, synthetic construct
  REGION 1..9: note = short peptide
VPDPTVSCL

SEQ ID NO: 2621 - protein, 8 aa, synthetic construct
  REGION 1..8: note = short peptide
EGFQKRCL

SEQ ID NO: 2622 - protein, 9 aa, synthetic construct
  REGION 1..9: note = short peptide
ESENNKLCS

SEQ ID NO: 2623 - protein, 11 aa, synthetic construct
  REGION 1..11: note = short peptide
EVAGIVAARHC

SEQ ID NO: 2624 - protein, 11 aa, synthetic construct
  REGION 1..11: note = short peptide
EVIPITNSELR

SEQ ID NO: 2625 - protein, 9 aa, synthetic construct
  REGION 1..9: note = short peptide
EVRSKCEEL

SEQ ID NO: 2626 - protein, 9 aa, synthetic construct
  REGION 1..9: note = short peptide
EVTQIACGR

SEQ ID NO: 2627 - protein, 14 aa, synthetic construct
  REGION 1..14: note = short peptide
VIEDYCTGLKALLY

SEQ ID NO: 2628 - protein, 9 aa, synthetic construct
  REGION 1..9: note = short peptide
MGLPRLVCA

SEQ ID NO: 2629 - protein, 9 aa, synthetic construct
  REGION 1..9: note = short peptide
ASHCPLLQK

SEQ ID NO: 2630 - protein, 9 aa, synthetic construct
  REGION 1..9: note = short peptide
DGLLVLCRI

SEQ ID NO: 2631 - protein, 9 aa, synthetic construct
  REGION 1..9: note = short peptide
IYTCVATNI

SEQ ID NO: 2632 - protein, 11 aa, synthetic construct
  REGION 1..11: note = short peptide
KIVDGACLNHF

SEQ ID NO: 2633 - protein, 9 aa, synthetic construct
  REGION 1..9: note = short peptide
KLCNIFSTK

SEQ ID NO: 2634 - protein, 10 aa, synthetic construct
  REGION 1..10: note = short peptide
KLFGQPPCAF

SEQ ID NO: 2635 - protein, 10 aa, synthetic construct
  REGION 1..10: note = short peptide
KLFPNCVPSF

SEQ ID NO: 2636 - protein, 8 aa, synthetic construct
  REGION 1..8: note = short peptide
LPGPAPCL

SEQ ID NO: 2637 - protein, 8 aa, synthetic construct
  REGION 1..8: note = short peptide
AHENCLLY

SEQ ID NO: 2638 - protein, 12 aa, synthetic construct
  REGION 1..12: note = short peptide
YPIDDVYTGMCL

SEQ ID NO: 2639 - protein, 9 aa, synthetic construct
  REGION 1..9: note = short peptide
KPKEPASCL

SEQ ID NO: 2640 - protein, 11 aa, synthetic construct
  REGION 1..11: note = short peptide
LLDSCAPLLRY

SEQ ID NO: 2641 - protein, 11 aa, synthetic construct
  REGION 1..11: note = short peptide
LLDSCAPLLRY

SEQ ID NO: 2642 - protein, 9 aa, synthetic construct
  REGION 1..9: note = short peptide
KRHLLHHCF

SEQ ID NO: 2643 - protein, 9 aa, synthetic construct
  REGION 1..9: note = short peptide
KRLCEIFTR

SEQ ID NO: 2644 - protein, 8 aa, synthetic construct
  REGION 1..8: note = short peptide
KYGCVDYW

SEQ ID NO: 2645 - protein, 9 aa, synthetic construct
  REGION 1..9: note = short peptide
LPFCKGDVL

SEQ ID NO: 2646 - protein, 8 aa, synthetic construct
  REGION 1..8: note = short peptide
CQNAAQIY

SEQ ID NO: 2647 - protein, 11 aa, synthetic construct
  REGION 1..11: note = short peptide
TLQPGCGRPQV

SEQ ID NO: 2648 - protein, 10 aa, synthetic construct
  REGION 1..10: note = short peptide
GTPRHILYCK

SEQ ID NO: 2649 - protein, 9 aa, synthetic construct
  REGION 1..9: note = short peptide
GQRLLVKCL

SEQ ID NO: 2650 - protein, 9 aa, synthetic construct
  REGION 1..9: note = short peptide
QSGNINAAK

SEQ ID NO: 2651 - protein, 8 aa, synthetic construct
  REGION 1..8: note = short peptide
EALAKHCL

SEQ ID NO: 2652 - protein, 9 aa, synthetic construct
  REGION 1..9: note = short peptide
RSSWPTHCK

SEQ ID NO: 2653 - protein, 9 aa, synthetic construct
  REGION 1..9: note = short peptide
TIRVKICRV

SEQ ID NO: 2654 - protein, 10 aa, synthetic construct
  REGION 1..10: note = short peptide
SVAKLGSVCR

SEQ ID NO: 2655 - protein, 10 aa, synthetic construct
  REGION 1..10: note = short peptide
RILPKCRTSY

SEQ ID NO: 2656 - protein, 14 aa, synthetic construct
  REGION 1..14: note = short peptide
QAGMTGYGMPRQIL

SEQ ID NO: 2657 - protein, 8 aa, synthetic construct
  REGION 1..8: note = short peptide
SSVLRQCY

SEQ ID NO: 2658 - protein, 11 aa, synthetic construct
  REGION 1..11: note = short peptide
NTVGLGLPMSR

SEQ ID NO: 2659 - protein, 10 aa, synthetic construct
  REGION 1..10: note = short peptide
NVADLVVILK

SEQ ID NO: 2660 - protein, 13 aa, synthetic construct
  REGION 1..13: note = short peptide
SLTSNHQKISSGK

SEQ ID NO: 2661 - protein, 10 aa, synthetic construct
  REGION 1..10: note = short peptide
NVIGPWIQTK

SEQ ID NO: 2662 - protein, 9 aa, synthetic construct
  REGION 1..9: note = short peptide
NVILPLISR

SEQ ID NO: 2663 - protein, 9 aa, synthetic construct
  REGION 1..9: note = short peptide
ATCGELLRH

SEQ ID NO: 2664 - protein, 11 aa, synthetic construct
  REGION 1..11: note = short peptide
NPAKNRDASTL

SEQ ID NO: 2665 - protein, 8 aa, synthetic construct
  REGION 1..8: note = short peptide
HIISGTCA

SEQ ID NO: 2666 - protein, 11 aa, synthetic construct
  REGION 1..11: note = short peptide
DAVPCSTTINR

SEQ ID NO: 2667 - protein, 13 aa, synthetic construct
  REGION 1..13: note = short peptide
ETRPAGDGTFQKW

SEQ ID NO: 2668 - protein, 12 aa, synthetic construct
  REGION 1..12: note = short peptide
SEEIITPVYCTG

SEQ ID NO: 2669 - protein, 11 aa, synthetic construct
  REGION 1..11: note = short peptide
LYPEWTEAQRL

SEQ ID NO: 2670 - protein, 9 aa, synthetic construct
  REGION 1..9: note = short peptide
STINYKWSF

SEQ ID NO: 2671 - protein, 8 aa, synthetic construct
  REGION 1..8: note = short peptide
SRGISDNY

SEQ ID NO: 2672 - protein, 9 aa, synthetic construct
  REGION 1..9: note = short peptide
NLIGCIIGR

SEQ ID NO: 2673 - protein, 9 aa, synthetic construct
  REGION 1..9: note = short peptide
NLIGCIIGR

SEQ ID NO: 2674 - protein, 9 aa, synthetic construct
  REGION 1..9: note = short peptide
KTNLPIFKL

SEQ ID NO: 2675 - protein, 11 aa, synthetic construct
  REGION 1..11: note = short peptide
LSFETTDDSLR

SEQ ID NO: 2676 - protein, 14 aa, synthetic construct
  REGION 1..14: note = short peptide
YVSQFEGSALGKQL

SEQ ID NO: 2677 - protein, 13 aa, synthetic construct
  REGION 1..13: note = short peptide
HHPGIAEFPSRGK

SEQ ID NO: 2678 - protein, 9 aa, synthetic construct
  REGION 1..9: note = short peptide
ACGLVASNL

SEQ ID NO: 2679 - protein, 8 aa, synthetic construct
  REGION 1..8: note = short peptide
RGGGLPFV

SEQ ID NO: 2680 - protein, 9 aa, synthetic construct
  REGION 1..9: note = short peptide
KSDLRPMLY

SEQ ID NO: 2681 - protein, 10 aa, synthetic construct
  REGION 1..10: note = short peptide
RPMMPQKVQL

SEQ ID NO: 2682 - protein, 14 aa, synthetic construct
  REGION 1..14: note = short peptide
HKAVLTIDEKGTEA

SEQ ID NO: 2683 - protein, 9 aa, synthetic construct
  REGION 1..9: note = short peptide
KSNLIIHQR

SEQ ID NO: 2684 - protein, 9 aa, synthetic construct
  REGION 1..9: note = short peptide
PFAKPLPTF

SEQ ID NO: 2685 - protein, 12 aa, synthetic construct
  REGION 1..12: note = short peptide
ARKSAPATGGVK

SEQ ID NO: 2686 - protein, 13 aa, synthetic construct
  REGION 1..13: note = short peptide
PEAAVGLLKGTAL

SEQ ID NO: 2687 - protein, 8 aa, synthetic construct
  REGION 1..8: note = short peptide
RGKTYISK

SEQ ID NO: 2688 - protein, 8 aa, synthetic construct
  REGION 1..8: note = short peptide
SFGSPLGL

SEQ ID NO: 2689 - protein, 9 aa, synthetic construct
  REGION 1..9: note = short peptide
LPTNLTHIL

SEQ ID NO: 2690 - protein, 10 aa, synthetic construct
  REGION 1..10: note = short peptide
LPVNFSGDLL

SEQ ID NO: 2691 - protein, 8 aa, synthetic construct
  REGION 1..8: note = short peptide
TVPQRVTL

SEQ ID NO: 2692 - protein, 9 aa, synthetic construct
  REGION 1..9: note = short peptide
RIKANQIHK

SEQ ID NO: 2693 - protein, 8 aa, synthetic construct
  REGION 1..8: note = short peptide
RKLFYVHY

SEQ ID NO: 2694 - protein, 8 aa, synthetic construct
  REGION 1..8: note = short peptide
KSKILRLL

SEQ ID NO: 2695 - protein, 12 aa, synthetic construct
  REGION 1..12: note = short peptide
GMTGYGMPRQIL

SEQ ID NO: 2696 - protein, 8 aa, synthetic construct
  REGION 1..8: note = short peptide
RDKGLSSK

SEQ ID NO: 2697 - protein, 9 aa, synthetic construct
  REGION 1..9: note = short peptide
VLDPYLLKY

SEQ ID NO: 2698 - protein, 15 aa, synthetic construct
  REGION 1..15: note = short peptide
ALHVPKAPGFAQMLK

SEQ ID NO: 2699 - protein, 9 aa, synthetic construct
  REGION 1..9: note = short peptide
VVSGLFRSL

SEQ ID NO: 2700 - protein, 13 aa, synthetic construct
  REGION 1..13: note = short peptide
AGSRLETVGSIFS

SEQ ID NO: 2701 - protein, 9 aa, synthetic construct
  REGION 1..9: note = short peptide
KQFRGLQSR

SEQ ID NO: 2702 - protein, 9 aa, synthetic construct
  REGION 1..9: note = short peptide
VPVRGGPKF

SEQ ID NO: 2703 - protein, 8 aa, synthetic construct
  REGION 1..8: note = short peptide
KQKTFIVK

SEQ ID NO: 2704 - protein, 9 aa, synthetic construct
  REGION 1..9: note = short peptide
KYIEGVSDF

SEQ ID NO: 2705 - protein, 9 aa, synthetic construct
  REGION 1..9: note = short peptide
HSDPSILGY

SEQ ID NO: 2706 - protein, 15 aa, synthetic construct
  REGION 1..15: note = short peptide
VKDARRFDGVDAEFK

SEQ ID NO: 2707 - protein, 9 aa, synthetic construct
  REGION 1..9: note = short peptide
VGLWLGLAK

SEQ ID NO: 2708 - protein, 9 aa, synthetic construct
  REGION 1..9: note = short peptide
GTNKVASQK

SEQ ID NO: 2709 - protein, 9 aa, synthetic construct
  REGION 1..9: note = short peptide
RPVSPPQKA

SEQ ID NO: 2710 - protein, 10 aa, synthetic construct
  REGION 1..10: note = short peptide
HTIAPMGTRR

SEQ ID NO: 2711 - protein, 9 aa, synthetic construct
  REGION 1..9: note = short peptide
RGAPPPGMM

SEQ ID NO: 2712 - protein, 10 aa, synthetic construct
  REGION 1..10: note = short peptide
KPAAVRPPAA

SEQ ID NO: 2713 - protein, 9 aa, synthetic construct
  REGION 1..9: note = short peptide
TYGEIFEKF

SEQ ID NO: 2714 - protein, 9 aa, synthetic construct
  REGION 1..9: note = short peptide
KPFEEKAAK

SEQ ID NO: 2715 - protein, 9 aa, synthetic construct
  REGION 1..9: note = short peptide
GKPVILLFR

SEQ ID NO: 2716 - protein, 11 aa, synthetic construct
  REGION 1..11: note = short peptide
RRLPHVVSHVH

SEQ ID NO: 2717 - protein, 14 aa, synthetic construct
  REGION 1..14: note = short peptide
RRKDHLKDHQNGSM

SEQ ID NO: 2718 - protein, 8 aa, synthetic construct
  REGION 1..8: note = short peptide
RQPPPPPR

SEQ ID NO: 2719 - protein, 9 aa, synthetic construct
  REGION 1..9: note = short peptide
RQPLKATAY

SEQ ID NO: 2720 - protein, 9 aa, synthetic construct
  REGION 1..9: note = short peptide
AIAGAPVTL

SEQ ID NO: 2721 - protein, 9 aa, synthetic construct
  REGION 1..9: note = short peptide
EAAAAARRQ

SEQ ID NO: 2722 - protein, 9 aa, synthetic construct
  REGION 1..9: note = short peptide
KILEVHVDK

SEQ ID NO: 2723 - protein, 11 aa, synthetic construct
  REGION 1..11: note = short peptide
DQVANSAFVER

SEQ ID NO: 2724 - protein, 12 aa, synthetic construct
  REGION 1..12: note = short peptide
ERQSAEDYEKEE

SEQ ID NO: 2725 - protein, 11 aa, synthetic construct
  REGION 1..11: note = short peptide
MPYPAPNVPVV

SEQ ID NO: 2726 - protein, 14 aa, synthetic construct
  REGION 1..14: note = short peptide
EESEKLSKMSSLLE

SEQ ID NO: 2727 - protein, 9 aa, synthetic construct
  REGION 1..9: note = short peptide
MPHHDASTF

SEQ ID NO: 2728 - protein, 9 aa, synthetic construct
  REGION 1..9: note = short peptide
MPVETFSEF

SEQ ID NO: 2729 - protein, 15 aa, synthetic construct
  REGION 1..15: note = short peptide
TEAPLNPKANREKMT

SEQ ID NO: 2730 - protein, 11 aa, synthetic construct
  REGION 1..11: note = short peptide
SVYSPSGPVNR

SEQ ID NO: 2731 - protein, 9 aa, synthetic construct
  REGION 1..9: note = short peptide
MPHHTPHQL

SEQ ID NO: 2732 - protein, 8 aa, synthetic construct
  REGION 1..8: note = short peptide
TEHIKNLQ

SEQ ID NO: 2733 - protein, 9 aa, synthetic construct
  REGION 1..9: note = short peptide
DSNGTFFVY

SEQ ID NO: 2734 - protein, 8 aa, synthetic construct
  REGION 1..8: note = short peptide
TNHGALIY

SEQ ID NO: 2735 - protein, 10 aa, synthetic construct
  REGION 1..10: note = short peptide
KLNPYAKTMR

SEQ ID NO: 2736 - protein, 10 aa, synthetic construct
  REGION 1..10: note = short peptide
KGDRGGIGEK

SEQ ID NO: 2737 - protein, 8 aa, synthetic construct
  REGION 1..8: note = short peptide
NPHDRKVI

SEQ ID NO: 2738 - protein, 9 aa, synthetic construct
  REGION 1..9: note = short peptide
THVNVSVVM

SEQ ID NO: 2739 - protein, 9 aa, synthetic construct
  REGION 1..9: note = short peptide
MPVMEQSVL

SEQ ID NO: 2740 - protein, 11 aa, synthetic construct
  REGION 1..11: note = short peptide
MDIAIHHPWIR

SEQ ID NO: 2741 - protein, 9 aa, synthetic construct
  REGION 1..9: note = short peptide
MPVLEQSVL

SEQ ID NO: 2742 - protein, 8 aa, synthetic construct
  REGION 1..8: note = short peptide
EKPASSGK

SEQ ID NO: 2743 - protein, 9 aa, synthetic construct
  REGION 1..9: note = short peptide
KILNGSNKK

SEQ ID NO: 2744 - protein, 13 aa, synthetic construct
  REGION 1..13: note = short peptide
MNDTVTIRTRKFM

SEQ ID NO: 2745 - protein, 10 aa, synthetic construct
  REGION 1..10: note = short peptide
NLNMSRVDVY

SEQ ID NO: 2746 - protein, 12 aa, synthetic construct
  REGION 1..12: note = short peptide
TLSKIHSLLTKG

SEQ ID NO: 2747 - protein, 9 aa, synthetic construct
  REGION 1..9: note = short peptide
MPFPGATII

SEQ ID NO: 2748 - protein, 15 aa, synthetic construct
  REGION 1..15: note = short peptide
KAVDKKAAGAGKVTK

SEQ ID NO: 2749 - protein, 9 aa, synthetic construct
  REGION 1..9: note = short peptide
MPFSPYEPL

SEQ ID NO: 2750 - protein, 9 aa, synthetic construct
  REGION 1..9: note = short peptide
MPEDLVEAL

SEQ ID NO: 2751 - protein, 10 aa, synthetic construct
  REGION 1..10: note = short peptide
SLNRSSFTYY

SEQ ID NO: 2752 - protein, 10 aa, synthetic construct
  REGION 1..10: note = short peptide
MPQSGTGVSV

SEQ ID NO: 2753 - protein, 9 aa, synthetic construct
  REGION 1..9: note = short peptide
NVADLHEKY

SEQ ID NO: 2754 - protein, 9 aa, synthetic construct
  REGION 1..9: note = short peptide
KLYDIDVAK

SEQ ID NO: 2755 - protein, 9 aa, synthetic construct
  REGION 1..9: note = short peptide
MPTVIPPGL

SEQ ID NO: 2756 - protein, 12 aa, synthetic construct
  REGION 1..12: note = short peptide
MPPDIAAEAQAL

SEQ ID NO: 2757 - protein, 8 aa, synthetic construct
  REGION 1..8: note = short peptide
KLYFPRHL

SEQ ID NO: 2758 - protein, 9 aa, synthetic construct
  REGION 1..9: note = short peptide
MPNASFSTL

SEQ ID NO: 2759 - protein, 9 aa, synthetic construct
  REGION 1..9: note = short peptide
EATPGAQKR

SEQ ID NO: 2760 - protein, 9 aa, synthetic construct
  REGION 1..9: note = short peptide
FPQDVINKL

SEQ ID NO: 2761 - protein, 15 aa, synthetic construct
  REGION 1..15: note = short peptide
KGRLSKDDIDRMVQE

SEQ ID NO: 2762 - protein, 9 aa, synthetic construct
  REGION 1..9: note = short peptide
DVKKEPLGR

SEQ ID NO: 2763 - protein, 12 aa, synthetic construct
  REGION 1..12: note = short peptide
MPILKDVATVAF

SEQ ID NO: 2764 - protein, 11 aa, synthetic construct
  REGION 1..11: note = short peptide
EAKQPNSAIRK

SEQ ID NO: 2765 - protein, 9 aa, synthetic construct
  REGION 1..9: note = short peptide
MPKFSMPGF

SEQ ID NO: 2766 - protein, 9 aa, synthetic construct
  REGION 1..9: note = short peptide
MPLQYIYTL

SEQ ID NO: 2767 - protein, 10 aa, synthetic construct
  REGION 1..10: note = short peptide
DVASVIVTKL

SEQ ID NO: 2768 - protein, 9 aa, synthetic construct
  REGION 1..9: note = short peptide
THVNVSVVM

SEQ ID NO: 2769 - protein, 12 aa, synthetic construct
  REGION 1..12: note = short peptide
YPYSCRSQENIL

SEQ ID NO: 2770 - protein, 9 aa, synthetic construct
  REGION 1..9: note = short peptide
ELIQRCKQM

SEQ ID NO: 2771 - protein, 9 aa, synthetic construct
  REGION 1..9: note = short peptide
DVSDLSLCK

SEQ ID NO: 2772 - protein, 9 aa, synthetic construct
  REGION 1..9: note = short peptide
KRGNFIPGL

SEQ ID NO: 2773 - protein, 9 aa, synthetic construct
  REGION 1..9: note = short peptide
SYTNCLQKI

SEQ ID NO: 2774 - protein, 9 aa, synthetic construct
  REGION 1..9: note = short peptide
IYVCRVEVL

SEQ ID NO: 2775 - protein, 10 aa, synthetic construct
  REGION 1..10: note = short peptide
ERCELARTLK

SEQ ID NO: 2776 - protein, 8 aa, synthetic construct
  REGION 1..8: note = short peptide
SSNPDLAG

SEQ ID NO: 2777 - protein, 10 aa, synthetic construct
  REGION 1..10: note = short peptide
ESYDCKVEHW

SEQ ID NO: 2778 - protein, 10 aa, synthetic construct
  REGION 1..10: note = short peptide
ETHCQSTPLK

SEQ ID NO: 2779 - protein, 9 aa, synthetic construct
  REGION 1..9: note = short peptide
KNICKVVEV

SEQ ID NO: 2780 - protein, 11 aa, synthetic construct
  REGION 1..11: note = short peptide
ETVCSPFTAAR

SEQ ID NO: 2781 - protein, 9 aa, synthetic construct
  REGION 1..9: note = short peptide
VLNPVVYCF

SEQ ID NO: 2782 - protein, 9 aa, synthetic construct
  REGION 1..9: note = short peptide
RLGCFNLTI

SEQ ID NO: 2783 - protein, 11 aa, synthetic construct
  REGION 1..11: note = short peptide
DTATGNCLLQR

SEQ ID NO: 2784 - protein, 12 aa, synthetic construct
  REGION 1..12: note = short peptide
MKVELCSFSGYK

SEQ ID NO: 2785 - protein, 9 aa, synthetic construct
  REGION 1..9: note = short peptide
KVRDTFCSY

SEQ ID NO: 2786 - protein, 11 aa, synthetic construct
  REGION 1..11: note = short peptide
DLADLSCLVYR

SEQ ID NO: 2787 - protein, 12 aa, synthetic construct
  REGION 1..12: note = short peptide
ALEAARICANKY

SEQ ID NO: 2788 - protein, 8 aa, synthetic construct
  REGION 1..8: note = short peptide
DLNSHNCL

SEQ ID NO: 2789 - protein, 13 aa, synthetic construct
  REGION 1..13: note = short peptide
DMVPGKPMCVESF

SEQ ID NO: 2790 - protein, 10 aa, synthetic construct
  REGION 1..10: note = short peptide
KMVDQLFCKK

SEQ ID NO: 2791 - protein, 12 aa, synthetic construct
  REGION 1..12: note = short peptide
RYSSAFCNKLFF

SEQ ID NO: 2792 - protein, 9 aa, synthetic construct
  REGION 1..9: note = short peptide
ALCSKSFSR

SEQ ID NO: 2793 - protein, 9 aa, synthetic construct
  REGION 1..9: note = short peptide
KYTEAYPCL

SEQ ID NO: 2794 - protein, 9 aa, synthetic construct
  REGION 1..9: note = short peptide
KSSCVKLQV

SEQ ID NO: 2795 - protein, 8 aa, synthetic construct
  REGION 1..8: note = short peptide
DSKLRCVF

SEQ ID NO: 2796 - protein, 10 aa, synthetic construct
  REGION 1..10: note = short peptide
DSYESGCLGR

SEQ ID NO: 2797 - protein, 10 aa, synthetic construct
  REGION 1..10: note = short peptide
ALQKNVICDK

SEQ ID NO: 2798 - protein, 11 aa, synthetic construct
  REGION 1..11: note = short peptide
NAIETMPCVKK

SEQ ID NO: 2799 - protein, 9 aa, synthetic construct
  REGION 1..9: note = short peptide
VLDCDLLLY

SEQ ID NO: 2800 - protein, 9 aa, synthetic construct
  REGION 1..9: note = short peptide
NPSPICQKL

SEQ ID NO: 2801 - protein, 9 aa, synthetic construct
  REGION 1..9: note = short peptide
GNDFDLGAL

SEQ ID NO: 2802 - protein, 9 aa, synthetic construct
  REGION 1..9: note = short peptide
KLCDVTLKI

SEQ ID NO: 2803 - protein, 9 aa, synthetic construct
  REGION 1..9: note = short peptide
NYVDCYLRL

SEQ ID NO: 2804 - protein, 10 aa, synthetic construct
  REGION 1..10: note = short peptide
GRFVCTVPGY

SEQ ID NO: 2805 - protein, 10 aa, synthetic construct
  REGION 1..10: note = short peptide
GRISCTIANR

SEQ ID NO: 2806 - protein, 10 aa, synthetic construct
  REGION 1..10: note = short peptide
KIISKNCTSY

SEQ ID NO: 2807 - protein, 9 aa, synthetic construct
  REGION 1..9: note = short peptide
GTCGQPADK

SEQ ID NO: 2808 - protein, 10 aa, synthetic construct
  REGION 1..10: note = short peptide
THICPVYEGF

SEQ ID NO: 2809 - protein, 9 aa, synthetic construct
  REGION 1..9: note = short peptide
NISQVLEKK

SEQ ID NO: 2810 - protein, 8 aa, synthetic construct
  REGION 1..8: note = short peptide
NRVGGLCL

SEQ ID NO: 2811 - protein, 8 aa, synthetic construct
  REGION 1..8: note = short peptide
NKGCNGGF

SEQ ID NO: 2812 - protein, 10 aa, synthetic construct
  REGION 1..10: note = short peptide
GVSCPVGIKK

SEQ ID NO: 2813 - protein, 14 aa, synthetic construct
  REGION 1..14: note = short peptide
PAILQSAALPFCPE

SEQ ID NO: 2814 - protein, 8 aa, synthetic construct
  REGION 1..8: note = short peptide
PDLCSLLI

SEQ ID NO: 2815 - protein, 10 aa, synthetic construct
  REGION 1..10: note = short peptide
KLCNEKLLKK

SEQ ID NO: 2816 - protein, 9 aa, synthetic construct
  REGION 1..9: note = short peptide
EVSSMPACK

SEQ ID NO: 2817 - protein, 9 aa, synthetic construct
  REGION 1..9: note = short peptide
NAKLKNCNL

SEQ ID NO: 2818 - protein, 10 aa, synthetic construct
  REGION 1..10: note = short peptide
SQCDAIRVTK

SEQ ID NO: 2819 - protein, 11 aa, synthetic construct
  REGION 1..11: note = short peptide
QVAVQEQEIAR

SEQ ID NO: 2820 - protein, 9 aa, synthetic construct
  REGION 1..9: note = short peptide
KLVPWSQCL

SEQ ID NO: 2821 - protein, 10 aa, synthetic construct
  REGION 1..10: note = short peptide
QRNCAAYLKL

SEQ ID NO: 2822 - protein, 9 aa, synthetic construct
  REGION 1..9: note = short peptide
SRYCLSSRL

SEQ ID NO: 2823 - protein, 9 aa, synthetic construct
  REGION 1..9: note = short peptide
SPDAKIFCL

SEQ ID NO: 2824 - protein, 9 aa, synthetic construct
  REGION 1..9: note = short peptide
LPFDDNICL

SEQ ID NO: 2825 - protein, 9 aa, synthetic construct
  REGION 1..9: note = short peptide
HPYPCSKAL

SEQ ID NO: 2826 - protein, 9 aa, synthetic construct
  REGION 1..9: note = short peptide
QHVCTIVSF

SEQ ID NO: 2827 - protein, 10 aa, synthetic construct
  REGION 1..10: note = short peptide
QAILAVKSTR

SEQ ID NO: 2828 - protein, 10 aa, synthetic construct
  REGION 1..10: note = short peptide
HPLSCHGWVL

SEQ ID NO: 2829 - protein, 9 aa, synthetic construct
  REGION 1..9: note = short peptide
GHCDSSTRI

SEQ ID NO: 2830 - protein, 9 aa, synthetic construct
  REGION 1..9: note = short peptide
HPHLCLVAL

SEQ ID NO: 2831 - protein, 12 aa, synthetic construct
  REGION 1..12: note = short peptide
NSDCYFGNGSAY

SEQ ID NO: 2832 - protein, 8 aa, synthetic construct
  REGION 1..8: note = short peptide
DEFKSFCH

SEQ ID NO: 2833 - protein, 11 aa, synthetic construct
  REGION 1..11: note = short peptide
CVTDISHLVRK

SEQ ID NO: 2834 - protein, 9 aa, synthetic construct
  REGION 1..9: note = short peptide
DACTRKIGL

SEQ ID NO: 2835 - protein, 9 aa, synthetic construct
  REGION 1..9: note = short peptide
RSCVVIIQK

SEQ ID NO: 2836 - protein, 9 aa, synthetic construct
  REGION 1..9: note = short peptide
WPFQQSCTF

SEQ ID NO: 2837 - protein, 9 aa, synthetic construct
  REGION 1..9: note = short peptide
CPIKEEIAI

SEQ ID NO: 2838 - protein, 9 aa, synthetic construct
  REGION 1..9: note = short peptide
CPSGRVYVL

SEQ ID NO: 2839 - protein, 10 aa, synthetic construct
  REGION 1..10: note = short peptide
AAASGHCGAF

SEQ ID NO: 2840 - protein, 9 aa, synthetic construct
  REGION 1..9: note = short peptide
CVISKVLTF

SEQ ID NO: 2841 - protein, 9 aa, synthetic construct
  REGION 1..9: note = short peptide
CEINGQNVI

SEQ ID NO: 2842 - protein, 10 aa, synthetic construct
  REGION 1..10: note = short peptide
CSSPKAALRY

SEQ ID NO: 2843 - protein, 9 aa, synthetic construct
  REGION 1..9: note = short peptide
HIKQNAQCL

SEQ ID NO: 2844 - protein, 9 aa, synthetic construct
  REGION 1..9: note = short peptide
DVRGKCTSL

SEQ ID NO: 2845 - protein, 9 aa, synthetic construct
  REGION 1..9: note = short peptide
DVRGKCTSL

SEQ ID NO: 2846 - protein, 9 aa, synthetic construct
  REGION 1..9: note = short peptide
APVCSSKTL

SEQ ID NO: 2847 - protein, 11 aa, synthetic construct
  REGION 1..11: note = short peptide
AVVGNGGILNK

SEQ ID NO: 2848 - protein, 11 aa, synthetic construct
  REGION 1..11: note = short peptide
NSVYLDALNYR

SEQ ID NO: 2849 - protein, 9 aa, synthetic construct
  REGION 1..9: note = short peptide
AVASGHSAW

SEQ ID NO: 2850 - protein, 9 aa, synthetic construct
  REGION 1..9: note = short peptide
NHCELLSRL

SEQ ID NO: 2851 - protein, 8 aa, synthetic construct
  REGION 1..8: note = short peptide
HQNSYKPY

SEQ ID NO: 2852 - protein, 10 aa, synthetic construct
  REGION 1..10: note = short peptide
NAIKPGLVKK

SEQ ID NO: 2853 - protein, 8 aa, synthetic construct
  REGION 1..8: note = short peptide
NALKLPVL

SEQ ID NO: 2854 - protein, 9 aa, synthetic construct
  REGION 1..9: note = short peptide
LACGVAKVL

SEQ ID NO: 2855 - protein, 9 aa, synthetic construct
  REGION 1..9: note = short peptide
ACGLVASNL

SEQ ID NO: 2856 - protein, 10 aa, synthetic construct
  REGION 1..10: note = short peptide
LPVNFSGDLL

SEQ ID NO: 2857 - protein, 9 aa, synthetic construct
  REGION 1..9: note = short peptide
VGLWLGLAK

SEQ ID NO: 2858 - protein, 11 aa, synthetic construct
  REGION 1..11: note = short peptide
RRLPHVVSHVH

SEQ ID NO: 2859 - protein, 8 aa, synthetic construct
  REGION 1..8: note = short peptide
KLYFPRHL

SEQ ID NO: 2860 - protein, 9 aa, synthetic construct
  REGION 1..9: note = short peptide
FPQDVINKL

SEQ ID NO: 2861 - protein, 10 aa, synthetic construct
  REGION 1..10: note = short peptide
KIISKNCTSY

SEQ ID NO: 2862 - protein, 10 aa, synthetic construct
  REGION 1..10: note = short peptide
KIISKNCTSY

SEQ ID NO: 2863 - protein, 8 aa, synthetic construct
  REGION 1..8: note = short peptide
NKGCNGGF

SEQ ID NO: 2864 - protein, 8 aa, synthetic construct
  REGION 1..8: note = short peptide
NKGCNGGF

SEQ ID NO: 2865 - protein, 9 aa, synthetic construct
  REGION 1..9: note = short peptide
SPMADRSMM

SEQ ID NO: 2866 - protein, 10 aa, synthetic construct
  REGION 1..10: note = short peptide
KYLSVQGQLF

SEQ ID NO: 2867 - protein, 15 aa, synthetic construct
  REGION 1..15: note = short peptide
GQKDSYVGDEAQSKR

SEQ ID NO: 2868 - protein, 15 aa, synthetic construct
  REGION 1..15: note = short peptide
AFKDTGKTPVEPEVA

SEQ ID NO: 2869 - protein, 9 aa, synthetic construct
  REGION 1..9: note = short peptide
KRGVLTLKY

SEQ ID NO: 2870 - protein, 9 aa, synthetic construct
  REGION 1..9: note = short peptide
MPDPTPFLL

SEQ ID NO: 2871 - protein, 9 aa, synthetic construct
  REGION 1..9: note = short peptide
HVMLQIINV

SEQ ID NO: 2872 - protein, 9 aa, synthetic construct
  REGION 1..9: note = short peptide
VTEALSANF

SEQ ID NO: 2873 - protein, 8 aa, synthetic construct
  REGION 1..8: note = short peptide
MQKIKSLM

SEQ ID NO: 2874 - protein, 14 aa, synthetic construct
  REGION 1..14: note = short peptide
AGVSFSGHRLELLA

SEQ ID NO: 2875 - protein, 9 aa, synthetic construct
  REGION 1..9: note = short peptide
ETEKMIEKY

SEQ ID NO: 2876 - protein, 9 aa, synthetic construct
  REGION 1..9: note = short peptide
KPTLYNVSL

SEQ ID NO: 2877 - protein, 9 aa, synthetic construct
  REGION 1..9: note = short peptide
SPLVDIPVL

SEQ ID NO: 2878 - protein, 11 aa, synthetic construct
  REGION 1..11: note = short peptide
VPRGPTATARF

SEQ ID NO: 2879 - protein, 8 aa, synthetic construct
  REGION 1..8: note = short peptide
QSNETALH

SEQ ID NO: 2880 - protein, 9 aa, synthetic construct
  REGION 1..9: note = short peptide
TDVLLGLLK

SEQ ID NO: 2881 - protein, 10 aa, synthetic construct
  REGION 1..10: note = short peptide
NVEKADKQRN

SEQ ID NO: 2882 - protein, 9 aa, synthetic construct
  REGION 1..9: note = short peptide
MPEVSVLVL

SEQ ID NO: 2883 - protein, 12 aa, synthetic construct
  REGION 1..12: note = short peptide
HAGEYGAEALER

SEQ ID NO: 2884 - protein, 10 aa, synthetic construct
  REGION 1..10: note = short peptide
KTLYLALGAV

SEQ ID NO: 2885 - protein, 9 aa, synthetic construct
  REGION 1..9: note = short peptide
DTAAQITQR

SEQ ID NO: 2886 - protein, 13 aa, synthetic construct
  REGION 1..13: note = short peptide
YPIRSAYPQQNLY

SEQ ID NO: 2887 - protein, 11 aa, synthetic construct
  REGION 1..11: note = short peptide
KSAPSTGGVKK

SEQ ID NO: 2888 - protein, 9 aa, synthetic construct
  REGION 1..9: note = short peptide
SVNGKVLSK

SEQ ID NO: 2889 - protein, 15 aa, synthetic construct
  REGION 1..15: note = short peptide
EASQQLLNEMKCQVE

SEQ ID NO: 2890 - protein, 9 aa, synthetic construct
  REGION 1..9: note = short peptide
DVIGDEICC

SEQ ID NO: 2891 - protein, 9 aa, synthetic construct
  REGION 1..9: note = short peptide
KTKDGVREV

SEQ ID NO: 2892 - protein, 10 aa, synthetic construct
  REGION 1..10: note = short peptide
RKAGGHDAGK

SEQ ID NO: 2893 - protein, 10 aa, synthetic construct
  REGION 1..10: note = short peptide
AAAAASRGVG

SEQ ID NO: 2894 - protein, 11 aa, synthetic construct
  REGION 1..11: note = short peptide
DVVGPEGMEKF

SEQ ID NO: 2895 - protein, 10 aa, synthetic construct
  REGION 1..10: note = short peptide
MPSLKHIVEL

SEQ ID NO: 2896 - protein, 15 aa, synthetic construct
  REGION 1..15: note = short peptide
RMKEAKEKRQEQIAK

SEQ ID NO: 2897 - protein, 13 aa, synthetic construct
  REGION 1..13: note = short peptide
HFRGGGGGGGGGN

SEQ ID NO: 2898 - protein, 11 aa, synthetic construct
  REGION 1..11: note = short peptide
RMKLPSSVGQK

SEQ ID NO: 2899 - protein, 14 aa, synthetic construct
  REGION 1..14: note = short peptide
STGGKAPRKQLATK

SEQ ID NO: 2900 - protein, 14 aa, synthetic construct
  REGION 1..14: note = short peptide
STGGKAPRKQLATK

SEQ ID NO: 2901 - protein, 9 aa, synthetic construct
  REGION 1..9: note = short peptide
RPGLQYRTV

SEQ ID NO: 2902 - protein, 14 aa, synthetic construct
  REGION 1..14: note = short peptide
STGGKAPRKQLATK

SEQ ID NO: 2903 - protein, 8 aa, synthetic construct
  REGION 1..8: note = short peptide
MPVEPEEL

SEQ ID NO: 2904 - protein, 10 aa, synthetic construct
  REGION 1..10: note = short peptide
TARVTQRAGP

SEQ ID NO: 2905 - protein, 11 aa, synthetic construct
  REGION 1..11: note = short peptide
HPNASTVGLVL

SEQ ID NO: 2906 - protein, 15 aa, synthetic construct
  REGION 1..15: note = short peptide
KVLERDQKLSELDDR

SEQ ID NO: 2907 - protein, 15 aa, synthetic construct
  REGION 1..15: note = short peptide
AEIRLVSKDGKSKGI

SEQ ID NO: 2908 - protein, 12 aa, synthetic construct
  REGION 1..12: note = short peptide
KVLRDNIQGITK

SEQ ID NO: 2909 - protein, 12 aa, synthetic construct
  REGION 1..12: note = short peptide
TAQAAPRGPKGP

SEQ ID NO: 2910 - protein, 8 aa, synthetic construct
  REGION 1..8: note = short peptide
AELRVLVA

SEQ ID NO: 2911 - protein, 8 aa, synthetic construct
  REGION 1..8: note = short peptide
DLNKRFIL

SEQ ID NO: 2912 - protein, 9 aa, synthetic construct
  REGION 1..9: note = short peptide
VVGAFPMAK

SEQ ID NO: 2913 - protein, 10 aa, synthetic construct
  REGION 1..10: note = short peptide
VVDPVNGWMY

SEQ ID NO: 2914 - protein, 11 aa, synthetic construct
  REGION 1..11: note = short peptide
EISSSPTSKNR

SEQ ID NO: 2915 - protein, 11 aa, synthetic construct
  REGION 1..11: note = short peptide
GRPGPPGPPGA

SEQ ID NO: 2916 - protein, 11 aa, synthetic construct
  REGION 1..11: note = short peptide
AEFPMSPVTSA

SEQ ID NO: 2917 - protein, 9 aa, synthetic construct
  REGION 1..9: note = short peptide
RGAPPPGMM

SEQ ID NO: 2918 - protein, 11 aa, synthetic construct
  REGION 1..11: note = short peptide
SYITEECLKKL

SEQ ID NO: 2919 - protein, 15 aa, synthetic construct
  REGION 1..15: note = short peptide
GTRYVQKGEYRTNPE

SEQ ID NO: 2920 - protein, 14 aa, synthetic construct
  REGION 1..14: note = short peptide
SYDRAITVFSPDGH

SEQ ID NO: 2921 - protein, 9 aa, synthetic construct
  REGION 1..9: note = short peptide
MPVGMTHGL

SEQ ID NO: 2922 - protein, 9 aa, synthetic construct
  REGION 1..9: note = short peptide
SYIEHIFEI

SEQ ID NO: 2923 - protein, 13 aa, synthetic construct
  REGION 1..13: note = short peptide
KTVTAMDVVYALK

SEQ ID NO: 2924 - protein, 9 aa, synthetic construct
  REGION 1..9: note = short peptide
KVCNPIITK

SEQ ID NO: 2925 - protein, 11 aa, synthetic construct
  REGION 1..11: note = short peptide
MPVGPDAILRY

SEQ ID NO: 2926 - protein, 9 aa, synthetic construct
  REGION 1..9: note = short peptide
SQNGSYHRI

SEQ ID NO: 2927 - protein, 10 aa, synthetic construct
  REGION 1..10: note = short peptide
KSAPATGGVK

SEQ ID NO: 2928 - protein, 15 aa, synthetic construct
  REGION 1..15: note = short peptide
TGKEKVTSGSTTTTR

SEQ ID NO: 2929 - protein, 10 aa, synthetic construct
  REGION 1..10: note = short peptide
SKPHSEAGTA

SEQ ID NO: 2930 - protein, 9 aa, synthetic construct
  REGION 1..9: note = short peptide
ILYGKIIHL

SEQ ID NO: 2931 - protein, 8 aa, synthetic construct
  REGION 1..8: note = short peptide
TLHVRALL

SEQ ID NO: 2932 - protein, 9 aa, synthetic construct
  REGION 1..9: note = short peptide
TLIGANASF

SEQ ID NO: 2933 - protein, 8 aa, synthetic construct
  REGION 1..8: note = short peptide
MDAATLTY

SEQ ID NO: 2934 - protein, 10 aa, synthetic construct
  REGION 1..10: note = short peptide
LYLLHCLLNK

SEQ ID NO: 2935 - protein, 9 aa, synthetic construct
  REGION 1..9: note = short peptide
GEAGVPAEF

SEQ ID NO: 2936 - protein, 12 aa, synthetic construct
  REGION 1..12: note = short peptide
FLEQVHQGIKGM

SEQ ID NO: 2937 - protein, 13 aa, synthetic construct
  REGION 1..13: note = short peptide
LVVYPWTQRFFDS

SEQ ID NO: 2938 - protein, 9 aa, synthetic construct
  REGION 1..9: note = short peptide
SDTPEIRKY

SEQ ID NO: 2939 - protein, 8 aa, synthetic construct
  REGION 1..8: note = short peptide
APTRASVI

SEQ ID NO: 2940 - protein, 10 aa, synthetic construct
  REGION 1..10: note = short peptide
KMYDAAKLLY

SEQ ID NO: 2941 - protein, 12 aa, synthetic construct
  REGION 1..12: note = short peptide
APRGVPQIEVTF

SEQ ID NO: 2942 - protein, 14 aa, synthetic construct
  REGION 1..14: note = short peptide
VDTGIGMTKADLIN

SEQ ID NO: 2943 - protein, 14 aa, synthetic construct
  REGION 1..14: note = short peptide
VDTGIGMTKADLIN

SEQ ID NO: 2944 - protein, 9 aa, synthetic construct
  REGION 1..9: note = short peptide
IISSPLTGK

SEQ ID NO: 2945 - protein, 9 aa, synthetic construct
  REGION 1..9: note = short peptide
PVPQQPPPP

SEQ ID NO: 2946 - protein, 9 aa, synthetic construct
  REGION 1..9: note = short peptide
KLHDAFFKW

SEQ ID NO: 2947 - protein, 9 aa, synthetic construct
  REGION 1..9: note = short peptide
LLGPRVIGK

SEQ ID NO: 2948 - protein, 11 aa, synthetic construct
  REGION 1..11: note = short peptide
ILFSNSTRLSF

SEQ ID NO: 2949 - protein, 12 aa, synthetic construct
  REGION 1..12: note = short peptide
LLYEQAQEEITR

SEQ ID NO: 2950 - protein, 15 aa, synthetic construct
  REGION 1..15: note = short peptide
ATLKEKLIAPVAEEE

SEQ ID NO: 2951 - protein, 10 aa, synthetic construct
  REGION 1..10: note = short peptide
KDFADIPNLR

SEQ ID NO: 2952 - protein, 13 aa, synthetic construct
  REGION 1..13: note = short peptide
ASFPGISTGPMKK

SEQ ID NO: 2953 - protein, 9 aa, synthetic construct
  REGION 1..9: note = short peptide
LPWAQNRSL

SEQ ID NO: 2954 - protein, 9 aa, synthetic construct
  REGION 1..9: note = short peptide
KLRKRLAPL

SEQ ID NO: 2955 - protein, 15 aa, synthetic construct
  REGION 1..15: note = short peptide
PNNLKPVVAEFYGSK

SEQ ID NO: 2956 - protein, 9 aa, synthetic construct
  REGION 1..9: note = short peptide
FQNLTQLRY

SEQ ID NO: 2957 - protein, 10 aa, synthetic construct
  REGION 1..10: note = short peptide
FPYANGTLGI

SEQ ID NO: 2958 - protein, 9 aa, synthetic construct
  REGION 1..9: note = short peptide
ASGPGIIRM

SEQ ID NO: 2959 - protein, 12 aa, synthetic construct
  REGION 1..12: note = short peptide
ASQSQGIQQLLQ

SEQ ID NO: 2960 - protein, 11 aa, synthetic construct
  REGION 1..11: note = short peptide
LSFETTDESLR

SEQ ID NO: 2961 - protein, 12 aa, synthetic construct
  REGION 1..12: note = short peptide
KLPGKGKSTMKK

SEQ ID NO: 2962 - protein, 12 aa, synthetic construct
  REGION 1..12: note = short peptide
SGGKYVDSEGHL

SEQ ID NO: 2963 - protein, 13 aa, synthetic construct
  REGION 1..13: note = short peptide
IPVGLLGKDICAC

SEQ ID NO: 2964 - protein, 9 aa, synthetic construct
  REGION 1..9: note = short peptide
LPLNSSTSL

SEQ ID NO: 2965 - protein, 9 aa, synthetic construct
  REGION 1..9: note = short peptide
AQFVRNLVE

SEQ ID NO: 2966 - protein, 14 aa, synthetic construct
  REGION 1..14: note = short peptide
SILKIHAREIFDSR

SEQ ID NO: 2967 - protein, 9 aa, synthetic construct
  REGION 1..9: note = short peptide
SIARVLTVI

SEQ ID NO: 2968 - protein, 13 aa, synthetic construct
  REGION 1..13: note = short peptide
ARKSAPSTGGVKK

SEQ ID NO: 2969 - protein, 9 aa, synthetic construct
  REGION 1..9: note = short peptide
ATDKSFVEK

SEQ ID NO: 2970 - protein, 9 aa, synthetic construct
  REGION 1..9: note = short peptide
FTQNSNLAK

SEQ ID NO: 2971 - protein, 10 aa, synthetic construct
  REGION 1..10: note = short peptide
TSTLMATLPG

SEQ ID NO: 2972 - protein, 10 aa, synthetic construct
  REGION 1..10: note = short peptide
PPLPPPPPVI

SEQ ID NO: 2973 - protein, 9 aa, synthetic construct
  REGION 1..9: note = short peptide
FENEMATAA

SEQ ID NO: 2974 - protein, 10 aa, synthetic construct
  REGION 1..10: note = short peptide
EVTNQTLDVK

SEQ ID NO: 2975 - protein, 10 aa, synthetic construct
  REGION 1..10: note = short peptide
GKQLEDGRTL

SEQ ID NO: 2976 - protein, 15 aa, synthetic construct
  REGION 1..15: note = short peptide
IAEERDKRLAAKQSS

SEQ ID NO: 2977 - protein, 9 aa, synthetic construct
  REGION 1..9: note = short peptide
FAERSVAKL

SEQ ID NO: 2978 - protein, 11 aa, synthetic construct
  REGION 1..11: note = short peptide
KKTYGEIFEKF

SEQ ID NO: 2979 - protein, 9 aa, synthetic construct
  REGION 1..9: note = short peptide
SLNPPIFLK

SEQ ID NO: 2980 - protein, 10 aa, synthetic construct
  REGION 1..10: note = short peptide
KDKNKFLEFK

SEQ ID NO: 2981 - protein, 9 aa, synthetic construct
  REGION 1..9: note = short peptide
VKAAALASL

SEQ ID NO: 2982 - protein, 9 aa, synthetic construct
  REGION 1..9: note = short peptide
QIFQRPIQH

SEQ ID NO: 2983 - protein, 9 aa, synthetic construct
  REGION 1..9: note = short peptide
KDSEKVVSI

SEQ ID NO: 2984 - protein, 8 aa, synthetic construct
  REGION 1..8: note = short peptide
VIKNKTWK

SEQ ID NO: 2985 - protein, 9 aa, synthetic construct
  REGION 1..9: note = short peptide
RVTYPAKAK

SEQ ID NO: 2986 - protein, 9 aa, synthetic construct
  REGION 1..9: note = short peptide
ALRNMAVGK

SEQ ID NO: 2987 - protein, 13 aa, synthetic construct
  REGION 1..13: note = short peptide
FGAALCLTGSQAL

SEQ ID NO: 2988 - protein, 10 aa, synthetic construct
  REGION 1..10: note = short peptide
THFNKGPSYG

SEQ ID NO: 2989 - protein, 9 aa, synthetic construct
  REGION 1..9: note = short peptide
MMGHRPVLV

SEQ ID NO: 2990 - protein, 9 aa, synthetic construct
  REGION 1..9: note = short peptide
QNSRIQQLF

SEQ ID NO: 2991 - protein, 13 aa, synthetic construct
  REGION 1..13: note = short peptide
LPFGCTKEEIVQF

SEQ ID NO: 2992 - protein, 11 aa, synthetic construct
  REGION 1..11: note = short peptide
KAQCPIVERLT

SEQ ID NO: 2993 - protein, 10 aa, synthetic construct
  REGION 1..10: note = short peptide
TLFGDKLCTV

SEQ ID NO: 2994 - protein, 9 aa, synthetic construct
  REGION 1..9: note = short peptide
RRIFAFICR

SEQ ID NO: 2995 - protein, 9 aa, synthetic construct
  REGION 1..9: note = short peptide
RLAATKCRK

SEQ ID NO: 2996 - protein, 10 aa, synthetic construct
  REGION 1..10: note = short peptide
VVDCGTGYTK

SEQ ID NO: 2997 - protein, 9 aa, synthetic construct
  REGION 1..9: note = short peptide
TAASEAACL

SEQ ID NO: 2998 - protein, 9 aa, synthetic construct
  REGION 1..9: note = short peptide
SRTPEVTCV

SEQ ID NO: 2999 - protein, 13 aa, synthetic construct
  REGION 1..13: note = short peptide
EAAQGSKSQCQTR

SEQ ID NO: 3000 - protein, 10 aa, synthetic construct
  REGION 1..10: note = short peptide
RRNPYCRTLF

SEQ ID NO: 3001 - protein, 9 aa, synthetic construct
  REGION 1..9: note = short peptide
DAICKVWDR

SEQ ID NO: 3002 - protein, 9 aa, synthetic construct
  REGION 1..9: note = short peptide
FQSTTGHCV

SEQ ID NO: 3003 - protein, 11 aa, synthetic construct
  REGION 1..11: note = short peptide
EVIADINCKGR

SEQ ID NO: 3004 - protein, 11 aa, synthetic construct
  REGION 1..11: note = short peptide
LPHCRTMKNVL

SEQ ID NO: 3005 - protein, 9 aa, synthetic construct
  REGION 1..9: note = short peptide
TVPATLNVL

SEQ ID NO: 3006 - protein, 9 aa, synthetic construct
  REGION 1..9: note = short peptide
LSECRLLAY

SEQ ID NO: 3007 - protein, 10 aa, synthetic construct
  REGION 1..10: note = short peptide
GCTKEEIVQF

SEQ ID NO: 3008 - protein, 9 aa, synthetic construct
  REGION 1..9: note = short peptide
KLGCVLMAW

SEQ ID NO: 3009 - protein, 9 aa, synthetic construct
  REGION 1..9: note = short peptide
KLGCVLMAW

SEQ ID NO: 3010 - protein, 9 aa, synthetic construct
  REGION 1..9: note = short peptide
RLPCLCIYH

SEQ ID NO: 3011 - protein, 9 aa, synthetic construct
  REGION 1..9: note = short peptide
SANKCLLKV

SEQ ID NO: 3012 - protein, 11 aa, synthetic construct
  REGION 1..11: note = short peptide
SESALLKCIEL

SEQ ID NO: 3013 - protein, 9 aa, synthetic construct
  REGION 1..9: note = short peptide
DACSGRVTV

SEQ ID NO: 3014 - protein, 9 aa, synthetic construct
  REGION 1..9: note = short peptide
THSHTCQCF

SEQ ID NO: 3015 - protein, 9 aa, synthetic construct
  REGION 1..9: note = short peptide
QHECSSSQL

SEQ ID NO: 3016 - protein, 11 aa, synthetic construct
  REGION 1..11: note = short peptide
QVVDQCSEILR

SEQ ID NO: 3017 - protein, 9 aa, synthetic construct
  REGION 1..9: note = short peptide
NHADIVSCV

SEQ ID NO: 3018 - protein, 11 aa, synthetic construct
  REGION 1..11: note = short peptide
GTQTDLFTCGK

SEQ ID NO: 3019 - protein, 11 aa, synthetic construct
  REGION 1..11: note = short peptide
EAVSKFIGECK

SEQ ID NO: 3020 - protein, 8 aa, synthetic construct
  REGION 1..8: note = short peptide
GVAHAGQL

SEQ ID NO: 3021 - protein, 9 aa, synthetic construct
  REGION 1..9: note = short peptide
LPEDCAEAL

SEQ ID NO: 3022 - protein, 9 aa, synthetic construct
  REGION 1..9: note = short peptide
GVCGKGFKK

SEQ ID NO: 3023 - protein, 10 aa, synthetic construct
  REGION 1..10: note = short peptide
SSCDVKLVEK

SEQ ID NO: 3024 - protein, 9 aa, synthetic construct
  REGION 1..9: note = short peptide
GYKQYWCTF

SEQ ID NO: 3025 - protein, 9 aa, synthetic construct
  REGION 1..9: note = short peptide
VYLLRSYCF

SEQ ID NO: 3026 - protein, 8 aa, synthetic construct
  REGION 1..8: note = short peptide
PVARSWVC

SEQ ID NO: 3027 - protein, 10 aa, synthetic construct
  REGION 1..10: note = short peptide
PVARSWVCRK

SEQ ID NO: 3028 - protein, 9 aa, synthetic construct
  REGION 1..9: note = short peptide
ENLNPLVVL

SEQ ID NO: 3029 - protein, 10 aa, synthetic construct
  REGION 1..10: note = short peptide
KMKEHKAICK

SEQ ID NO: 3030 - protein, 9 aa, synthetic construct
  REGION 1..9: note = short peptide
KMVDQLFCK

SEQ ID NO: 3031 - protein, 11 aa, synthetic construct
  REGION 1..11: note = short peptide
QAAAGALRNLV

SEQ ID NO: 3032 - protein, 9 aa, synthetic construct
  REGION 1..9: note = short peptide
VDNIRVCKI

SEQ ID NO: 3033 - protein, 9 aa, synthetic construct
  REGION 1..9: note = short peptide
AQCGKAFPK

SEQ ID NO: 3034 - protein, 9 aa, synthetic construct
  REGION 1..9: note = short peptide
TTQVTQFIL

SEQ ID NO: 3035 - protein, 8 aa, synthetic construct
  REGION 1..8: note = short peptide
ELACPAER

SEQ ID NO: 3036 - protein, 10 aa, synthetic construct
  REGION 1..10: note = short peptide
ESIDDALNCR

SEQ ID NO: 3037 - protein, 8 aa, synthetic construct
  REGION 1..8: note = short peptide
IYIDASCL

SEQ ID NO: 3038 - protein, 8 aa, synthetic construct
  REGION 1..8: note = short peptide
KDSCITVM

SEQ ID NO: 3039 - protein, 10 aa, synthetic construct
  REGION 1..10: note = short peptide
TAGCGSTFFR

SEQ ID NO: 3040 - protein, 10 aa, synthetic construct
  REGION 1..10: note = short peptide
RRQAMPFKCM

SEQ ID NO: 3041 - protein, 10 aa, synthetic construct
  REGION 1..10: note = short peptide
LLDCTVKIFY

SEQ ID NO: 3042 - protein, 9 aa, synthetic construct
  REGION 1..9: note = short peptide
ETECPQYIR

SEQ ID NO: 3043 - protein, 8 aa, synthetic construct
  REGION 1..8: note = short peptide
SIDCGHSF

SEQ ID NO: 3044 - protein, 11 aa, synthetic construct
  REGION 1..11: note = short peptide
LTEIYSQCQRY

SEQ ID NO: 3045 - protein, 11 aa, synthetic construct
  REGION 1..11: note = short peptide
RIAGLCNRAVF

SEQ ID NO: 3046 - protein, 10 aa, synthetic construct
  REGION 1..10: note = short peptide
GICGKGFVQK

SEQ ID NO: 3047 - protein, 10 aa, synthetic construct
  REGION 1..10: note = short peptide
ESIEDLHTCR

SEQ ID NO: 3048 - protein, 9 aa, synthetic construct
  REGION 1..9: note = short peptide
LLKIRCEHF

SEQ ID NO: 3049 - protein, 9 aa, synthetic construct
  REGION 1..9: note = short peptide
HFIECIFHF

SEQ ID NO: 3050 - protein, 10 aa, synthetic construct
  REGION 1..10: note = short peptide
IPICAPYTTM

SEQ ID NO: 3051 - protein, 9 aa, synthetic construct
  REGION 1..9: note = short peptide
FVRGICTRF

SEQ ID NO: 3052 - protein, 9 aa, synthetic construct
  REGION 1..9: note = short peptide
ARSCIRAYF

SEQ ID NO: 3053 - protein, 9 aa, synthetic construct
  REGION 1..9: note = short peptide
DLIGCVIGR

SEQ ID NO: 3054 - protein, 9 aa, synthetic construct
  REGION 1..9: note = short peptide
MSASKIVCR

SEQ ID NO: 3055 - protein, 9 aa, synthetic construct
  REGION 1..9: note = short peptide
GRHCVVKSR

SEQ ID NO: 3056 - protein, 10 aa, synthetic construct
  REGION 1..10: note = short peptide
SRFKKKCFKL

SEQ ID NO: 3057 - protein, 9 aa, synthetic construct
  REGION 1..9: note = short peptide
VIFCNTKRK

SEQ ID NO: 3058 - protein, 9 aa, synthetic construct
  REGION 1..9: note = short peptide
GRHCLRAHF

SEQ ID NO: 3059 - protein, 11 aa, synthetic construct
  REGION 1..11: note = short peptide
RRYNGGVGRCA

SEQ ID NO: 3060 - protein, 9 aa, synthetic construct
  REGION 1..9: note = short peptide
HPVCQVIAM

SEQ ID NO: 3061 - protein, 13 aa, synthetic construct
  REGION 1..13: note = short peptide
ALCSEAALQAIRK

SEQ ID NO: 3062 - protein, 9 aa, synthetic construct
  REGION 1..9: note = short peptide
RTCGEVIVK

SEQ ID NO: 3063 - protein, 9 aa, synthetic construct
  REGION 1..9: note = short peptide
GRFCGYAGF

SEQ ID NO: 3064 - protein, 10 aa, synthetic construct
  REGION 1..10: note = short peptide
FSECGELFRY

SEQ ID NO: 3065 - protein, 8 aa, synthetic construct
  REGION 1..8: note = short peptide
TLVTCVTF

SEQ ID NO: 3066 - protein, 8 aa, synthetic construct
  REGION 1..8: note = short peptide
IQVQVCLY

SEQ ID NO: 3067 - protein, 9 aa, synthetic construct
  REGION 1..9: note = short peptide
DAACGPGHI

SEQ ID NO: 3068 - protein, 13 aa, synthetic construct
  REGION 1..13: note = short peptide
IPIEVCPISNQVL

SEQ ID NO: 3069 - protein, 9 aa, synthetic construct
  REGION 1..9: note = short peptide
RPHHSIRCM

SEQ ID NO: 3070 - protein, 9 aa, synthetic construct
  REGION 1..9: note = short peptide
CPLEKALEI

SEQ ID NO: 3071 - protein, 9 aa, synthetic construct
  REGION 1..9: note = short peptide
IPVNVRFCL

SEQ ID NO: 3072 - protein, 9 aa, synthetic construct
  REGION 1..9: note = short peptide
LPVYLNCVL

SEQ ID NO: 3073 - protein, 9 aa, synthetic construct
  REGION 1..9: note = short peptide
QLQERCKAL

SEQ ID NO: 3074 - protein, 9 aa, synthetic construct
  REGION 1..9: note = short peptide
GRNCARLLL

SEQ ID NO: 3075 - protein, 10 aa, synthetic construct
  REGION 1..10: note = short peptide
THCLWTDQLL

SEQ ID NO: 3076 - protein, 9 aa, synthetic construct
  REGION 1..9: note = short peptide
LPVEKQCEL

SEQ ID NO: 3077 - protein, 9 aa, synthetic construct
  REGION 1..9: note = short peptide
GTDCHRKAY

SEQ ID NO: 3078 - protein, 13 aa, synthetic construct
  REGION 1..13: note = short peptide
SLRQLAQKYNCDK

SEQ ID NO: 3079 - protein, 8 aa, synthetic construct
  REGION 1..8: note = short peptide
LQHLLGSL

SEQ ID NO: 3080 - protein, 9 aa, synthetic construct
  REGION 1..9: note = short peptide
QLHSKKFCL

SEQ ID NO: 3081 - protein, 9 aa, synthetic construct
  REGION 1..9: note = short peptide
ATCPQPWRY

SEQ ID NO: 3082 - protein, 8 aa, synthetic construct
  REGION 1..8: note = short peptide
DEVIMCTF

SEQ ID NO: 3083 - protein, 10 aa, synthetic construct
  REGION 1..10: note = short peptide
QTNCPLYVTK

SEQ ID NO: 3084 - protein, 9 aa, synthetic construct
  REGION 1..9: note = short peptide
TPTNLAVCL

SEQ ID NO: 3085 - protein, 9 aa, synthetic construct
  REGION 1..9: note = short peptide
AVNEATCTW

SEQ ID NO: 3086 - protein, 11 aa, synthetic construct
  REGION 1..11: note = short peptide
FGCDLGPDGRL

SEQ ID NO: 3087 - protein, 11 aa, synthetic construct
  REGION 1..11: note = short peptide
FPTMNGVSQVL

SEQ ID NO: 3088 - protein, 9 aa, synthetic construct
  REGION 1..9: note = short peptide
LPISGTHCI

SEQ ID NO: 3089 - protein, 9 aa, synthetic construct
  REGION 1..9: note = short peptide
YPITDVCQI

SEQ ID NO: 3090 - protein, 9 aa, synthetic construct
  REGION 1..9: note = short peptide
SVCERPHYK

SEQ ID NO: 3091 - protein, 11 aa, synthetic construct
  REGION 1..11: note = short peptide
FPVETNCGHLF

SEQ ID NO: 3092 - protein, 10 aa, synthetic construct
  REGION 1..10: note = short peptide
SAFGNILSCK

SEQ ID NO: 3093 - protein, 11 aa, synthetic construct
  REGION 1..11: note = short peptide
RPQCPVGLNTL

SEQ ID NO: 3094 - protein, 10 aa, synthetic construct
  REGION 1..10: note = short peptide
KHSVEVTNCF

SEQ ID NO: 3095 - protein, 9 aa, synthetic construct
  REGION 1..9: note = short peptide
KLFGQPPCA

SEQ ID NO: 3096 - protein, 10 aa, synthetic construct
  REGION 1..10: note = short peptide
VTCPNEKVAK

SEQ ID NO: 3097 - protein, 10 aa, synthetic construct
  REGION 1..10: note = short peptide
HPVPCEQPAL

SEQ ID NO: 3098 - protein, 11 aa, synthetic construct
  REGION 1..11: note = short peptide
APCEFGVLNSL

SEQ ID NO: 3099 - protein, 8 aa, synthetic construct
  REGION 1..8: note = short peptide
DPNTHHCL

SEQ ID NO: 3100 - protein, 9 aa, synthetic construct
  REGION 1..9: note = short peptide
RPRGFQCDL

SEQ ID NO: 3101 - protein, 12 aa, synthetic construct
  REGION 1..12: note = short peptide
DDCVFGGQRLTL

SEQ ID NO: 3102 - protein, 9 aa, synthetic construct
  REGION 1..9: note = short peptide
APTDYCFVL

SEQ ID NO: 3103 - protein, 9 aa, synthetic construct
  REGION 1..9: note = short peptide
VYMPCLYVY

SEQ ID NO: 3104 - protein, 9 aa, synthetic construct
  REGION 1..9: note = short peptide
FPSKVCLQL

SEQ ID NO: 3105 - protein, 10 aa, synthetic construct
  REGION 1..10: note = short peptide
QTNCPLYITK

SEQ ID NO: 3106 - protein, 11 aa, synthetic construct
  REGION 1..11: note = short peptide
FHCEPANILYI

SEQ ID NO: 3107 - protein, 11 aa, synthetic construct
  REGION 1..11: note = short peptide
SFCPTVNLDKL

SEQ ID NO: 3108 - protein, 9 aa, synthetic construct
  REGION 1..9: note = short peptide
IGKRKIMCV

SEQ ID NO: 3109 - protein, 8 aa, synthetic construct
  REGION 1..8: note = short peptide
HQQQVTCY

SEQ ID NO: 3110 - protein, 9 aa, synthetic construct
  REGION 1..9: note = short peptide
SSDPFLNSG

SEQ ID NO: 3111 - protein, 8 aa, synthetic construct
  REGION 1..8: note = short peptide
SSDKSVCL

SEQ ID NO: 3112 - protein, 8 aa, synthetic construct
  REGION 1..8: note = short peptide
GQTCVVHY

SEQ ID NO: 3113 - protein, 12 aa, synthetic construct
  REGION 1..12: note = short peptide
RPRFVKQDQVCI

SEQ ID NO: 3114 - protein, 11 aa, synthetic construct
  REGION 1..11: note = short peptide
EYVNGQLKNKY

SEQ ID NO: 3115 - protein, 8 aa, synthetic construct
  REGION 1..8: note = short peptide
DEHVVCKV

SEQ ID NO: 3116 - protein, 9 aa, synthetic construct
  REGION 1..9: note = short peptide
MGHLDVVAL

SEQ ID NO: 3117 - protein, 9 aa, synthetic construct
  REGION 1..9: note = short peptide
QDNCRAANF

SEQ ID NO: 3118 - protein, 9 aa, synthetic construct
  REGION 1..9: note = short peptide
NLITGMFQR

SEQ ID NO: 3119 - protein, 8 aa, synthetic construct
  REGION 1..8: note = short peptide
RLKSTCIY

SEQ ID NO: 3120 - protein, 9 aa, synthetic construct
  REGION 1..9: note = short peptide
VQVPEARCF

SEQ ID NO: 3121 - protein, 15 aa, synthetic construct
  REGION 1..15: note = short peptide
GQKDSYVGDEAQSKR

SEQ ID NO: 3122 - protein, 9 aa, synthetic construct
  REGION 1..9: note = short peptide
HVMLQIINV

SEQ ID NO: 3123 - protein, 10 aa, synthetic construct
  REGION 1..10: note = short peptide
NVEKADKQRN

SEQ ID NO: 3124 - protein, 15 aa, synthetic construct
  REGION 1..15: note = short peptide
EASQQLLNEMKCQVE

SEQ ID NO: 3125 - protein, 15 aa, synthetic construct
  REGION 1..15: note = short peptide
GTRYVQKGEYRTNPE

SEQ ID NO: 3126 - protein, 8 aa, synthetic construct
  REGION 1..8: note = short peptide
TLHVRALL

SEQ ID NO: 3127 - protein, 9 aa, synthetic construct
  REGION 1..9: note = short peptide
KLHDAFFKW

SEQ ID NO: 3128 - protein, 9 aa, synthetic construct
  REGION 1..9: note = short peptide
FTQNSNLAK

SEQ ID NO: 3129 - protein, 8 aa, synthetic construct
  REGION 1..8: note = short peptide
VIKNKTWK

SEQ ID NO: 3130 - protein, 9 aa, synthetic construct
  REGION 1..9: note = short peptide
ALRNMAVGK

SEQ ID NO: 3131 - protein, 13 aa, synthetic construct
  REGION 1..13: note = short peptide
FGAALCLTGSQAL

SEQ ID NO: 3132 - protein, 9 aa, synthetic construct
  REGION 1..9: note = short peptide
QNSRIQQLF

SEQ ID NO: 3133 - protein, 9 aa, synthetic construct
  REGION 1..9: note = short peptide
RLPCLCIYH

SEQ ID NO: 3134 - protein, 9 aa, synthetic construct
  REGION 1..9: note = short peptide
RLPCLCIYH

SEQ ID NO: 3135 - protein, 9 aa, synthetic construct
  REGION 1..9: note = short peptide
LPSISDPRM

SEQ ID NO: 3136 - protein, 15 aa, synthetic construct
  REGION 1..15: note = short peptide
KEFTPPVQAAYQKVV

SEQ ID NO: 3137 - protein, 10 aa, synthetic construct
  REGION 1..10: note = short peptide
MSDPYMPSYY

SEQ ID NO: 3138 - protein, 10 aa, synthetic construct
  REGION 1..10: note = short peptide
LTNMTVTNHY

SEQ ID NO: 3139 - protein, 8 aa, synthetic construct
  REGION 1..8: note = short peptide
KKSPPPAK

SEQ ID NO: 3140 - protein, 10 aa, synthetic construct
  REGION 1..10: note = short peptide
KMPKVKMPKF

SEQ ID NO: 3141 - protein, 11 aa, synthetic construct
  REGION 1..11: note = short peptide
KALGDEDDLAK

SEQ ID NO: 3142 - protein, 9 aa, synthetic construct
  REGION 1..9: note = short peptide
KLYPWIHQF

SEQ ID NO: 3143 - protein, 9 aa, synthetic construct
  REGION 1..9: note = short peptide
MPRVQTQQY

SEQ ID NO: 3144 - protein, 14 aa, synthetic construct
  REGION 1..14: note = short peptide
LPRGMQPTEFFQSL

SEQ ID NO: 3145 - protein, 10 aa, synthetic construct
  REGION 1..10: note = short peptide
KSTLALQLGQ

SEQ ID NO: 3146 - protein, 8 aa, synthetic construct
  REGION 1..8: note = short peptide
KPRASSLL

SEQ ID NO: 3147 - protein, 10 aa, synthetic construct
  REGION 1..10: note = short peptide
KMPNASFSTL

SEQ ID NO: 3148 - protein, 10 aa, synthetic construct
  REGION 1..10: note = short peptide
ISEHPAENSL

SEQ ID NO: 3149 - protein, 8 aa, synthetic construct
  REGION 1..8: note = short peptide
KKENKPVI

SEQ ID NO: 3150 - protein, 15 aa, synthetic construct
  REGION 1..15: note = short peptide
PDLKLVPPMEEDYPQ

SEQ ID NO: 3151 - protein, 9 aa, synthetic construct
  REGION 1..9: note = short peptide
KTENQTRQV

SEQ ID NO: 3152 - protein, 11 aa, synthetic construct
  REGION 1..11: note = short peptide
KYIENLDNITF

SEQ ID NO: 3153 - protein, 10 aa, synthetic construct
  REGION 1..10: note = short peptide
KTIDKILKCK

SEQ ID NO: 3154 - protein, 10 aa, synthetic construct
  REGION 1..10: note = short peptide
ITEVPPDEPV

SEQ ID NO: 3155 - protein, 9 aa, synthetic construct
  REGION 1..9: note = short peptide
MPSPVSPKL

SEQ ID NO: 3156 - protein, 9 aa, synthetic construct
  REGION 1..9: note = short peptide
LANDTFRTL

SEQ ID NO: 3157 - protein, 11 aa, synthetic construct
  REGION 1..11: note = short peptide
KGPLATGGIKK

SEQ ID NO: 3158 - protein, 15 aa, synthetic construct
  REGION 1..15: note = short peptide
PEEDKKTYGEIFEKF

SEQ ID NO: 3159 - protein, 8 aa, synthetic construct
  REGION 1..8: note = short peptide
KSKAIYDI

SEQ ID NO: 3160 - protein, 9 aa, synthetic construct
  REGION 1..9: note = short peptide
MPLSVFPYY

SEQ ID NO: 3161 - protein, 8 aa, synthetic construct
  REGION 1..8: note = short peptide
MLKSKTFL

SEQ ID NO: 3162 - protein, 9 aa, synthetic construct
  REGION 1..9: note = short peptide
MPVDRILEA

SEQ ID NO: 3163 - protein, 9 aa, synthetic construct
  REGION 1..9: note = short peptide
KKETKLVLK

SEQ ID NO: 3164 - protein, 10 aa, synthetic construct
  REGION 1..10: note = short peptide
IHANLTTLTF

SEQ ID NO: 3165 - protein, 10 aa, synthetic construct
  REGION 1..10: note = short peptide
KVYYPKYLSK

SEQ ID NO: 3166 - protein, 9 aa, synthetic construct
  REGION 1..9: note = short peptide
KWIDTQVVL

SEQ ID NO: 3167 - protein, 13 aa, synthetic construct
  REGION 1..13: note = short peptide
KRKIVLDPSGSMN

SEQ ID NO: 3168 - protein, 9 aa, synthetic construct
  REGION 1..9: note = short peptide
LLLEPYNKY

SEQ ID NO: 3169 - protein, 11 aa, synthetic construct
  REGION 1..11: note = short peptide
QTDNQSRLQRY

SEQ ID NO: 3170 - protein, 12 aa, synthetic construct
  REGION 1..12: note = short peptide
KVLRDNIQGITK

SEQ ID NO: 3171 - protein, 9 aa, synthetic construct
  REGION 1..9: note = short peptide
MDGLTAKVF

SEQ ID NO: 3172 - protein, 10 aa, synthetic construct
  REGION 1..10: note = short peptide
KLIFHNSCFC

SEQ ID NO: 3173 - protein, 9 aa, synthetic construct
  REGION 1..9: note = short peptide
MPFGNVISA

SEQ ID NO: 3174 - protein, 9 aa, synthetic construct
  REGION 1..9: note = short peptide
IITDSITLK

SEQ ID NO: 3175 - protein, 10 aa, synthetic construct
  REGION 1..10: note = short peptide
KPAAVRPPAA

SEQ ID NO: 3176 - protein, 9 aa, synthetic construct
  REGION 1..9: note = short peptide
IHNRTFSRL

SEQ ID NO: 3177 - protein, 9 aa, synthetic construct
  REGION 1..9: note = short peptide
MPVVAGAVF

SEQ ID NO: 3178 - protein, 15 aa, synthetic construct
  REGION 1..15: note = short peptide
KQSGYGGQTKPIFRK

SEQ ID NO: 3179 - protein, 8 aa, synthetic construct
  REGION 1..8: note = short peptide
KVSVIVML

SEQ ID NO: 3180 - protein, 9 aa, synthetic construct
  REGION 1..9: note = short peptide
MPVTPQASV

SEQ ID NO: 3181 - protein, 12 aa, synthetic construct
  REGION 1..12: note = short peptide
KVSMPDVDLNLK

SEQ ID NO: 3182 - protein, 10 aa, synthetic construct
  REGION 1..10: note = short peptide
KELPEKKKMK

SEQ ID NO: 3183 - protein, 8 aa, synthetic construct
  REGION 1..8: note = short peptide
KNGLSLMK

SEQ ID NO: 3184 - protein, 13 aa, synthetic construct
  REGION 1..13: note = short peptide
KPGTPGGTGGPAP

SEQ ID NO: 3185 - protein, 9 aa, synthetic construct
  REGION 1..9: note = short peptide
KPHENKTYL

SEQ ID NO: 3186 - protein, 9 aa, synthetic construct
  REGION 1..9: note = short peptide
KYEELFPAF

SEQ ID NO: 3187 - protein, 8 aa, synthetic construct
  REGION 1..8: note = short peptide
LDMIPDLK

SEQ ID NO: 3188 - protein, 10 aa, synthetic construct
  REGION 1..10: note = short peptide
PNVNLPNVNL

SEQ ID NO: 3189 - protein, 8 aa, synthetic construct
  REGION 1..8: note = short peptide
KEGTGGPA

SEQ ID NO: 3190 - protein, 8 aa, synthetic construct
  REGION 1..8: note = short peptide
PTHLLAKL

SEQ ID NO: 3191 - protein, 9 aa, synthetic construct
  REGION 1..9: note = short peptide
HPNASTVGL

SEQ ID NO: 3192 - protein, 11 aa, synthetic construct
  REGION 1..11: note = short peptide
MPDQFDQAVVL

SEQ ID NO: 3193 - protein, 10 aa, synthetic construct
  REGION 1..10: note = short peptide
HPMNKTSASL

SEQ ID NO: 3194 - protein, 9 aa, synthetic construct
  REGION 1..9: note = short peptide
MPVHAAVQM

SEQ ID NO: 3195 - protein, 9 aa, synthetic construct
  REGION 1..9: note = short peptide
KIKQSVGNK

SEQ ID NO: 3196 - protein, 12 aa, synthetic construct
  REGION 1..12: note = short peptide
MDAIKKKMQMLK

SEQ ID NO: 3197 - protein, 12 aa, synthetic construct
  REGION 1..12: note = short peptide
MDAIKKKMQMLK

SEQ ID NO: 3198 - protein, 8 aa, synthetic construct
  REGION 1..8: note = short peptide
KELLQHPF

SEQ ID NO: 3199 - protein, 14 aa, synthetic construct
  REGION 1..14: note = short peptide
KNLGIPKPFGPQIK

SEQ ID NO: 3200 - protein, 15 aa, synthetic construct
  REGION 1..15: note = short peptide
HTEKLVTSKGDKELR

SEQ ID NO: 3201 - protein, 8 aa, synthetic construct
  REGION 1..8: note = short peptide
LPAKRGLL

SEQ ID NO: 3202 - protein, 9 aa, synthetic construct
  REGION 1..9: note = short peptide
KVAGAATPK

SEQ ID NO: 3203 - protein, 13 aa, synthetic construct
  REGION 1..13: note = short peptide
HPISSEELLSLKY

SEQ ID NO: 3204 - protein, 9 aa, synthetic construct
  REGION 1..9: note = short peptide
RVFQDVAQK

SEQ ID NO: 3205 - protein, 11 aa, synthetic construct
  REGION 1..11: note = short peptide
EAVWVNESVVR

SEQ ID NO: 3206 - protein, 11 aa, synthetic construct
  REGION 1..11: note = short peptide
EAVACGAELAL

SEQ ID NO: 3207 - protein, 9 aa, synthetic construct
  REGION 1..9: note = short peptide
RTKSPGPAR

SEQ ID NO: 3208 - protein, 9 aa, synthetic construct
  REGION 1..9: note = short peptide
GPNPRPSGL

SEQ ID NO: 3209 - protein, 9 aa, synthetic construct
  REGION 1..9: note = short peptide
EANAYDFIM

SEQ ID NO: 3210 - protein, 10 aa, synthetic construct
  REGION 1..10: note = short peptide
RVFPDKGYSF

SEQ ID NO: 3211 - protein, 13 aa, synthetic construct
  REGION 1..13: note = short peptide
RVINEPTAAALAY

SEQ ID NO: 3212 - protein, 10 aa, synthetic construct
  REGION 1..10: note = short peptide
TGGGNALQAI

SEQ ID NO: 3213 - protein, 9 aa, synthetic construct
  REGION 1..9: note = short peptide
EACPVRALL

SEQ ID NO: 3214 - protein, 9 aa, synthetic construct
  REGION 1..9: note = short peptide
SSRGPLPVK

SEQ ID NO: 3215 - protein, 10 aa, synthetic construct
  REGION 1..10: note = short peptide
SSSPGTSVKK

SEQ ID NO: 3216 - protein, 10 aa, synthetic construct
  REGION 1..10: note = short peptide
GIYPPGSPGK

SEQ ID NO: 3217 - protein, 9 aa, synthetic construct
  REGION 1..9: note = short peptide
DVVELLIKY

SEQ ID NO: 3218 - protein, 11 aa, synthetic construct
  REGION 1..11: note = short peptide
AVKVQTTKRGD

SEQ ID NO: 3219 - protein, 9 aa, synthetic construct
  REGION 1..9: note = short peptide
SRYQGVNLY

SEQ ID NO: 3220 - protein, 8 aa, synthetic construct
  REGION 1..8: note = short peptide
AVNKGLTL

SEQ ID NO: 3221 - protein, 8 aa, synthetic construct
  REGION 1..8: note = short peptide
TKGRPRGL

SEQ ID NO: 3222 - protein, 8 aa, synthetic construct
  REGION 1..8: note = short peptide
TVYRNFTM

SEQ ID NO: 3223 - protein, 9 aa, synthetic construct
  REGION 1..9: note = short peptide
GPRFPGNQI

SEQ ID NO: 3224 - protein, 9 aa, synthetic construct
  REGION 1..9: note = short peptide
DSVPPASAR

SEQ ID NO: 3225 - protein, 15 aa, synthetic construct
  REGION 1..15: note = short peptide
SHTELAPLRAPLIPM

SEQ ID NO: 3226 - protein, 8 aa, synthetic construct
  REGION 1..8: note = short peptide
CGGGGRVY

SEQ ID NO: 3227 - protein, 10 aa, synthetic construct
  REGION 1..10: note = short peptide
THIFNGSNWI

SEQ ID NO: 3228 - protein, 9 aa, synthetic construct
  REGION 1..9: note = short peptide
YMNGTMSQV

SEQ ID NO: 3229 - protein, 15 aa, synthetic construct
  REGION 1..15: note = short peptide
SSHHPGIAEFPSRGK

SEQ ID NO: 3230 - protein, 11 aa, synthetic construct
  REGION 1..11: note = short peptide
RTINETHNFLF

SEQ ID NO: 3231 - protein, 9 aa, synthetic construct
  REGION 1..9: note = short peptide
YMNGTMSQV

SEQ ID NO: 3232 - protein, 8 aa, synthetic construct
  REGION 1..8: note = short peptide
TVTGLVAP

SEQ ID NO: 3233 - protein, 9 aa, synthetic construct
  REGION 1..9: note = short peptide
FTGSIFIGR

SEQ ID NO: 3234 - protein, 8 aa, synthetic construct
  REGION 1..8: note = short peptide
SGALPLCL

SEQ ID NO: 3235 - protein, 9 aa, synthetic construct
  REGION 1..9: note = short peptide
STVHEILCK

SEQ ID NO: 3236 - protein, 11 aa, synthetic construct
  REGION 1..11: note = short peptide
SFPKYKPSSLR

SEQ ID NO: 3237 - protein, 11 aa, synthetic construct
  REGION 1..11: note = short peptide
SARDFLASLAF

SEQ ID NO: 3238 - protein, 9 aa, synthetic construct
  REGION 1..9: note = short peptide
SYIEHIFEI

SEQ ID NO: 3239 - protein, 10 aa, synthetic construct
  REGION 1..10: note = short peptide
VHNSTVQASM

SEQ ID NO: 3240 - protein, 10 aa, synthetic construct
  REGION 1..10: note = short peptide
DSAGSGNVTR

SEQ ID NO: 3241 - protein, 9 aa, synthetic construct
  REGION 1..9: note = short peptide
GDIDKRVEV

SEQ ID NO: 3242 - protein, 9 aa, synthetic construct
  REGION 1..9: note = short peptide
SESAQSKML

SEQ ID NO: 3243 - protein, 15 aa, synthetic construct
  REGION 1..15: note = short peptide
SARGPAIGIDLGTTY

SEQ ID NO: 3244 - protein, 10 aa, synthetic construct
  REGION 1..10: note = short peptide
DINCINLDWI

SEQ ID NO: 3245 - protein, 11 aa, synthetic construct
  REGION 1..11: note = short peptide
ALPFRKDLEKY

SEQ ID NO: 3246 - protein, 12 aa, synthetic construct
  REGION 1..12: note = short peptide
SGPKFNSAIRGK

SEQ ID NO: 3247 - protein, 13 aa, synthetic construct
  REGION 1..13: note = short peptide
DESGPSIVHRKCF

SEQ ID NO: 3248 - protein, 15 aa, synthetic construct
  REGION 1..15: note = short peptide
VKKQKKPLVGKKAAA

SEQ ID NO: 3249 - protein, 11 aa, synthetic construct
  REGION 1..11: note = short peptide
FTDPGMGNLTY

SEQ ID NO: 3250 - protein, 9 aa, synthetic construct
  REGION 1..9: note = short peptide
TATLRPYLS

SEQ ID NO: 3251 - protein, 10 aa, synthetic construct
  REGION 1..10: note = short peptide
GGQTKPIFRK

SEQ ID NO: 3252 - protein, 14 aa, synthetic construct
  REGION 1..14: note = short peptide
DVPHIALDGKLGGL

SEQ ID NO: 3253 - protein, 8 aa, synthetic construct
  REGION 1..8: note = short peptide
DVNKKFSV

SEQ ID NO: 3254 - protein, 10 aa, synthetic construct
  REGION 1..10: note = short peptide
YAAPPSPPLS

SEQ ID NO: 3255 - protein, 10 aa, synthetic construct
  REGION 1..10: note = short peptide
SVHNFTLPSW

SEQ ID NO: 3256 - protein, 9 aa, synthetic construct
  REGION 1..9: note = short peptide
FHFEPNDYF

SEQ ID NO: 3257 - protein, 10 aa, synthetic construct
  REGION 1..10: note = short peptide
TTDCLQILAY

SEQ ID NO: 3258 - protein, 15 aa, synthetic construct
  REGION 1..15: note = short peptide
SPRGGTPGSGAAAAA

SEQ ID NO: 3259 - protein, 15 aa, synthetic construct
  REGION 1..15: note = short peptide
SPADKTNVKAAWGKV

SEQ ID NO: 3260 - protein, 11 aa, synthetic construct
  REGION 1..11: note = short peptide
VLSPADKTNVK

SEQ ID NO: 3261 - protein, 9 aa, synthetic construct
  REGION 1..9: note = short peptide
GSYSNHVLY

SEQ ID NO: 3262 - protein, 14 aa, synthetic construct
  REGION 1..14: note = short peptide
ATDELATKLSRRLQ

SEQ ID NO: 3263 - protein, 9 aa, synthetic construct
  REGION 1..9: note = short peptide
TQRDFMLSF

SEQ ID NO: 3264 - protein, 9 aa, synthetic construct
  REGION 1..9: note = short peptide
YTVNVTLLR

SEQ ID NO: 3265 - protein, 8 aa, synthetic construct
  REGION 1..8: note = short peptide
HEAQIQDM

SEQ ID NO: 3266 - protein, 11 aa, synthetic construct
  REGION 1..11: note = short peptide
RPRSGSTGSSL

SEQ ID NO: 3267 - protein, 9 aa, synthetic construct
  REGION 1..9: note = short peptide
VMDKMQLTY

SEQ ID NO: 3268 - protein, 8 aa, synthetic construct
  REGION 1..8: note = short peptide
TQNRAAYY

SEQ ID NO: 3269 - protein, 9 aa, synthetic construct
  REGION 1..9: note = short peptide
ARTKQTARK

SEQ ID NO: 3270 - protein, 9 aa, synthetic construct
  REGION 1..9: note = short peptide
AHTNATVSF

SEQ ID NO: 3271 - protein, 11 aa, synthetic construct
  REGION 1..11: note = short peptide
TVGNVLTLLAL

SEQ ID NO: 3272 - protein, 11 aa, synthetic construct
  REGION 1..11: note = short peptide
RPHGDRKSCEM

SEQ ID NO: 3273 - protein, 9 aa, synthetic construct
  REGION 1..9: note = short peptide
YYRTNHTVM

SEQ ID NO: 3274 - protein, 13 aa, synthetic construct
  REGION 1..13: note = short peptide
AGVSFSGHRLELL

SEQ ID NO: 3275 - protein, 9 aa, synthetic construct
  REGION 1..9: note = short peptide
ETMPCVKKK

SEQ ID NO: 3276 - protein, 11 aa, synthetic construct
  REGION 1..11: note = short peptide
YPIEHGIVTNW

SEQ ID NO: 3277 - protein, 10 aa, synthetic construct
  REGION 1..10: note = short peptide
AVGNVTAALK

SEQ ID NO: 3278 - protein, 11 aa, synthetic construct
  REGION 1..11: note = short peptide
TSLSSSSSLGP

SEQ ID NO: 3279 - protein, 9 aa, synthetic construct
  REGION 1..9: note = short peptide
TPAFRPVSL

SEQ ID NO: 3280 - protein, 9 aa, synthetic construct
  REGION 1..9: note = short peptide
YSANGTIEY

SEQ ID NO: 3281 - protein, 11 aa, synthetic construct
  REGION 1..11: note = short peptide
RRRSLGEQDQM

SEQ ID NO: 3282 - protein, 9 aa, synthetic construct
  REGION 1..9: note = short peptide
TPGAEDKGK

SEQ ID NO: 3283 - protein, 9 aa, synthetic construct
  REGION 1..9: note = short peptide
TPITIFMEY

SEQ ID NO: 3284 - protein, 12 aa, synthetic construct
  REGION 1..12: note = short peptide
ARVDPGSISSLK

SEQ ID NO: 3285 - protein, 9 aa, synthetic construct
  REGION 1..9: note = short peptide
NPYPFQCTI

SEQ ID NO: 3286 - protein, 9 aa, synthetic construct
  REGION 1..9: note = short peptide
CQDKNFLLY

SEQ ID NO: 3287 - protein, 10 aa, synthetic construct
  REGION 1..10: note = short peptide
ERMKCLYYLY

SEQ ID NO: 3288 - protein, 14 aa, synthetic construct
  REGION 1..14: note = short peptide
ASEDAPYPVCTVRY

SEQ ID NO: 3289 - protein, 10 aa, synthetic construct
  REGION 1..10: note = short peptide
KIADLGNACW

SEQ ID NO: 3290 - protein, 10 aa, synthetic construct
  REGION 1..10: note = short peptide
KMKEHKAICK

SEQ ID NO: 3291 - protein, 9 aa, synthetic construct
  REGION 1..9: note = short peptide
HPYLGCIVM

SEQ ID NO: 3292 - protein, 9 aa, synthetic construct
  REGION 1..9: note = short peptide
FPLCRTPQF

SEQ ID NO: 3293 - protein, 10 aa, synthetic construct
  REGION 1..10: note = short peptide
FPLCGKAVEM

SEQ ID NO: 3294 - protein, 9 aa, synthetic construct
  REGION 1..9: note = short peptide
MVEKCLDKY

SEQ ID NO: 3295 - protein, 11 aa, synthetic construct
  REGION 1..11: note = short peptide
QRCESGGFLSK

SEQ ID NO: 3296 - protein, 9 aa, synthetic construct
  REGION 1..9: note = short peptide
ASHCPLLQK

SEQ ID NO: 3297 - protein, 8 aa, synthetic construct
  REGION 1..8: note = short peptide
LNSAQNCL

SEQ ID NO: 3298 - protein, 10 aa, synthetic construct
  REGION 1..10: note = short peptide
YTEKCVMNNY

SEQ ID NO: 3299 - protein, 9 aa, synthetic construct
  REGION 1..9: note = short peptide
TEALIRTCL

SEQ ID NO: 3300 - protein, 11 aa, synthetic construct
  REGION 1..11: note = short peptide
RVMPSLAYCTF

SEQ ID NO: 3301 - protein, 10 aa, synthetic construct
  REGION 1..10: note = short peptide
RQNSTGKACF

SEQ ID NO: 3302 - protein, 11 aa, synthetic construct
  REGION 1..11: note = short peptide
FPIPEKKEPCL

SEQ ID NO: 3303 - protein, 11 aa, synthetic construct
  REGION 1..11: note = short peptide
IIAPLCTSVGR

SEQ ID NO: 3304 - protein, 9 aa, synthetic construct
  REGION 1..9: note = short peptide
QSCQATRTV

SEQ ID NO: 3305 - protein, 9 aa, synthetic construct
  REGION 1..9: note = short peptide
CPGPHAIVL

SEQ ID NO: 3306 - protein, 8 aa, synthetic construct
  REGION 1..8: note = short peptide
QGGGKETL

SEQ ID NO: 3307 - protein, 9 aa, synthetic construct
  REGION 1..9: note = short peptide
FIYKCDAVL

SEQ ID NO: 3308 - protein, 11 aa, synthetic construct
  REGION 1..11: note = short peptide
QHDCVTIINNF

SEQ ID NO: 3309 - protein, 10 aa, synthetic construct
  REGION 1..10: note = short peptide
LPIENTTDCL

SEQ ID NO: 3310 - protein, 11 aa, synthetic construct
  REGION 1..11: note = short peptide
RSCSVNNKVSK

SEQ ID NO: 3311 - protein, 10 aa, synthetic construct
  REGION 1..10: note = short peptide
EVSDLIKECR

SEQ ID NO: 3312 - protein, 10 aa, synthetic construct
  REGION 1..10: note = short peptide
GAVVTAMMCR

SEQ ID NO: 3313 - protein, 9 aa, synthetic construct
  REGION 1..9: note = short peptide
SLNEMRCAY

SEQ ID NO: 3314 - protein, 10 aa, synthetic construct
  REGION 1..10: note = short peptide
KLERANSQLK

SEQ ID NO: 3315 - protein, 9 aa, synthetic construct
  REGION 1..9: note = short peptide
KLGCVLMAW

SEQ ID NO: 3316 - protein, 8 aa, synthetic construct
  REGION 1..8: note = short peptide
QHSPLAAG

SEQ ID NO: 3317 - protein, 10 aa, synthetic construct
  REGION 1..10: note = short peptide
THQIGCQSSI

SEQ ID NO: 3318 - protein, 9 aa, synthetic construct
  REGION 1..9: note = short peptide
RRFCYQNTF

SEQ ID NO: 3319 - protein, 9 aa, synthetic construct
  REGION 1..9: note = short peptide
CPPEIKITI

SEQ ID NO: 3320 - protein, 10 aa, synthetic construct
  REGION 1..10: note = short peptide
VYIGPSCLKF

SEQ ID NO: 3321 - protein, 9 aa, synthetic construct
  REGION 1..9: note = short peptide
DAACRVIAR

SEQ ID NO: 3322 - protein, 9 aa, synthetic construct
  REGION 1..9: note = short peptide
IHCDMVITY

SEQ ID NO: 3323 - protein, 9 aa, synthetic construct
  REGION 1..9: note = short peptide
FTDSDCIGK

SEQ ID NO: 3324 - protein, 11 aa, synthetic construct
  REGION 1..11: note = short peptide
VHSMCQTAQSF

SEQ ID NO: 3325 - protein, 11 aa, synthetic construct
  REGION 1..11: note = short peptide
QSFPGIEVTVK

SEQ ID NO: 3326 - protein, 9 aa, synthetic construct
  REGION 1..9: note = short peptide
KISDLCVAL

SEQ ID NO: 3327 - protein, 12 aa, synthetic construct
  REGION 1..12: note = short peptide
HCDKLHVDPENF

SEQ ID NO: 3328 - protein, 11 aa, synthetic construct
  REGION 1..11: note = short peptide
YPDSPSACLVL

SEQ ID NO: 3329 - protein, 9 aa, synthetic construct
  REGION 1..9: note = short peptide
HACSSIIKM

SEQ ID NO: 3330 - protein, 10 aa, synthetic construct
  REGION 1..10: note = short peptide
KENQNHSYSL

SEQ ID NO: 3331 - protein, 9 aa, synthetic construct
  REGION 1..9: note = short peptide
ETIEGALCK

SEQ ID NO: 3332 - protein, 14 aa, synthetic construct
  REGION 1..14: note = short peptide
VIEDYCTGLKALLY

SEQ ID NO: 3333 - protein, 9 aa, synthetic construct
  REGION 1..9: note = short peptide
KLTDFGLCK

SEQ ID NO: 3334 - protein, 13 aa, synthetic construct
  REGION 1..13: note = short peptide
ETVNGDIFICTQK

SEQ ID NO: 3335 - protein, 8 aa, synthetic construct
  REGION 1..8: note = short peptide
FLRMKCTL

SEQ ID NO: 3336 - protein, 9 aa, synthetic construct
  REGION 1..9: note = short peptide
RVFKGLCSL

SEQ ID NO: 3337 - protein, 9 aa, synthetic construct
  REGION 1..9: note = short peptide
SRTSLCFKL

SEQ ID NO: 3338 - protein, 8 aa, synthetic construct
  REGION 1..8: note = short peptide
SLRECELY

SEQ ID NO: 3339 - protein, 11 aa, synthetic construct
  REGION 1..11: note = short peptide
YTAPSSAVCGV

SEQ ID NO: 3340 - protein, 10 aa, synthetic construct
  REGION 1..10: note = short peptide
LWPSNPGCLF

SEQ ID NO: 3341 - protein, 11 aa, synthetic construct
  REGION 1..11: note = short peptide
RLCDFNPKSSK

SEQ ID NO: 3342 - protein, 9 aa, synthetic construct
  REGION 1..9: note = short peptide
RLCDQKFPK

SEQ ID NO: 3343 - protein, 11 aa, synthetic construct
  REGION 1..11: note = short peptide
RLCDQKFPKTK

SEQ ID NO: 3344 - protein, 13 aa, synthetic construct
  REGION 1..13: note = short peptide
VAEKRLIPDGCGV

SEQ ID NO: 3345 - protein, 9 aa, synthetic construct
  REGION 1..9: note = short peptide
KAQGRDRAK

SEQ ID NO: 3346 - protein, 10 aa, synthetic construct
  REGION 1..10: note = short peptide
DVVYVIDSCK

SEQ ID NO: 3347 - protein, 11 aa, synthetic construct
  REGION 1..11: note = short peptide
RLCQNPKLQLK

SEQ ID NO: 3348 - protein, 9 aa, synthetic construct
  REGION 1..9: note = short peptide
CLDPSLVTK

SEQ ID NO: 3349 - protein, 10 aa, synthetic construct
  REGION 1..10: note = short peptide
KTNMEKLTFY

SEQ ID NO: 3350 - protein, 9 aa, synthetic construct
  REGION 1..9: note = short peptide
TACGEARVL

SEQ ID NO: 3351 - protein, 11 aa, synthetic construct
  REGION 1..11: note = short peptide
YLDLHDCYLKY

SEQ ID NO: 3352 - protein, 9 aa, synthetic construct
  REGION 1..9: note = short peptide
APDCRFLTI

SEQ ID NO: 3353 - protein, 11 aa, synthetic construct
  REGION 1..11: note = short peptide
YKIDCNLLEFK

SEQ ID NO: 3354 - protein, 9 aa, synthetic construct
  REGION 1..9: note = short peptide
DIAIPCNNK

SEQ ID NO: 3355 - protein, 9 aa, synthetic construct
  REGION 1..9: note = short peptide
AVCGFHLGY

SEQ ID NO: 3356 - protein, 8 aa, synthetic construct
  REGION 1..8: note = short peptide
SLERHVCL

SEQ ID NO: 3357 - protein, 15 aa, synthetic construct
  REGION 1..15: note = short peptide
NCPFHYNPAQYDYDR

SEQ ID NO: 3358 - protein, 9 aa, synthetic construct
  REGION 1..9: note = short peptide
SVCGKAFSH

SEQ ID NO: 3359 - protein, 10 aa, synthetic construct
  REGION 1..10: note = short peptide
KTKSCSGVEF

SEQ ID NO: 3360 - protein, 9 aa, synthetic construct
  REGION 1..9: note = short peptide
SYNDIYCRF

SEQ ID NO: 3361 - protein, 9 aa, synthetic construct
  REGION 1..9: note = short peptide
KRNCFASVF

SEQ ID NO: 3362 - protein, 10 aa, synthetic construct
  REGION 1..10: note = short peptide
NVSFPHAAQW

SEQ ID NO: 3363 - protein, 9 aa, synthetic construct
  REGION 1..9: note = short peptide
LANQVSVCL

SEQ ID NO: 3364 - protein, 9 aa, synthetic construct
  REGION 1..9: note = short peptide
NETIWYLKY

SEQ ID NO: 3365 - protein, 9 aa, synthetic construct
  REGION 1..9: note = short peptide
GQFCIPEHI

SEQ ID NO: 3366 - protein, 8 aa, synthetic construct
  REGION 1..8: note = short peptide
NEYKIIML

SEQ ID NO: 3367 - protein, 11 aa, synthetic construct
  REGION 1..11: note = short peptide
KYPCSKFIIAI

SEQ ID NO: 3368 - protein, 9 aa, synthetic construct
  REGION 1..9: note = short peptide
GRDQNGLSK

SEQ ID NO: 3369 - protein, 9 aa, synthetic construct
  REGION 1..9: note = short peptide
ALRCKIEHV

SEQ ID NO: 3370 - protein, 8 aa, synthetic construct
  REGION 1..8: note = short peptide
NFTKIVEW

SEQ ID NO: 3371 - protein, 11 aa, synthetic construct
  REGION 1..11: note = short peptide
NYSNVIANLRW

SEQ ID NO: 3372 - protein, 8 aa, synthetic construct
  REGION 1..8: note = short peptide
NGTVVHHI

SEQ ID NO: 3373 - protein, 9 aa, synthetic construct
  REGION 1..9: note = short peptide
SLHEICSKI

SEQ ID NO: 3374 - protein, 12 aa, synthetic construct
  REGION 1..12: note = short peptide
RVCSNRHGLIRK

SEQ ID NO: 3375 - protein, 9 aa, synthetic construct
  REGION 1..9: note = short peptide
TVQFVQGIF

SEQ ID NO: 3376 - protein, 9 aa, synthetic construct
  REGION 1..9: note = short peptide
IYTPISCKI

SEQ ID NO: 3377 - protein, 10 aa, synthetic construct
  REGION 1..10: note = short peptide
VYLPTIQSCW

SEQ ID NO: 3378 - protein, 10 aa, synthetic construct
  REGION 1..10: note = short peptide
KRELAGEQPY

SEQ ID NO: 3379 - protein, 9 aa, synthetic construct
  REGION 1..9: note = short peptide
DLRKTACSL

SEQ ID NO: 3380 - protein, 9 aa, synthetic construct
  REGION 1..9: note = short peptide
DVIFSVMCY

SEQ ID NO: 3381 - protein, 9 aa, synthetic construct
  REGION 1..9: note = short peptide
NHFRCQVQF

SEQ ID NO: 3382 - protein, 11 aa, synthetic construct
  REGION 1..11: note = short peptide
DVINAKSICRL

SEQ ID NO: 3383 - protein, 10 aa, synthetic construct
  REGION 1..10: note = short peptide
STSQLVACTK

SEQ ID NO: 3384 - protein, 9 aa, synthetic construct
  REGION 1..9: note = short peptide
DHCDFPELL

SEQ ID NO: 3385 - protein, 9 aa, synthetic construct
  REGION 1..9: note = short peptide
TANLCVLLY

SEQ ID NO: 3386 - protein, 9 aa, synthetic construct
  REGION 1..9: note = short peptide
RTNGNIKHK

SEQ ID NO: 3387 - protein, 9 aa, synthetic construct
  REGION 1..9: note = short peptide
EHCEEHVAF

SEQ ID NO: 3388 - protein, 9 aa, synthetic construct
  REGION 1..9: note = short peptide
KMYTGLCNF

SEQ ID NO: 3389 - protein, 9 aa, synthetic construct
  REGION 1..9: note = short peptide
RRFNIKMCF

SEQ ID NO: 3390 - protein, 9 aa, synthetic construct
  REGION 1..9: note = short peptide
LLSTYICKV

SEQ ID NO: 3391 - protein, 9 aa, synthetic construct
  REGION 1..9: note = short peptide
TTICRLESF

SEQ ID NO: 3392 - protein, 10 aa, synthetic construct
  REGION 1..10: note = short peptide
SIIPLALPCK

SEQ ID NO: 3393 - protein, 9 aa, synthetic construct
  REGION 1..9: note = short peptide
LYQRWCELL

SEQ ID NO: 3394 - protein, 12 aa, synthetic construct
  REGION 1..12: note = short peptide
YSDEPCIGQEYQ

SEQ ID NO: 3395 - protein, 9 aa, synthetic construct
  REGION 1..9: note = short peptide
RVYKYCSKL

SEQ ID NO: 3396 - protein, 10 aa, synthetic construct
  REGION 1..10: note = short peptide
TAVLGNSILI

SEQ ID NO: 3397 - protein, 9 aa, synthetic construct
  REGION 1..9: note = short peptide
SHCDETYTL

SEQ ID NO: 3398 - protein, 9 aa, synthetic construct
  REGION 1..9: note = short peptide
PYVCQVCQF

SEQ ID NO: 3399 - protein, 10 aa, synthetic construct
  REGION 1..10: note = short peptide
RPQPCPLPRA

SEQ ID NO: 3400 - protein, 9 aa, synthetic construct
  REGION 1..9: note = short peptide
HIAVNKGHL

SEQ ID NO: 3401 - protein, 8 aa, synthetic construct
  REGION 1..8: note = short peptide
TKKIKQCL

SEQ ID NO: 3402 - protein, 10 aa, synthetic construct
  REGION 1..10: note = short peptide
SHAVACVNQF

SEQ ID NO: 3403 - protein, 14 aa, synthetic construct
  REGION 1..14: note = short peptide
HIYDTKLGTDKCDN

SEQ ID NO: 3404 - protein, 11 aa, synthetic construct
  REGION 1..11: note = short peptide
EGAPLKLKCEL

SEQ ID NO: 3405 - protein, 9 aa, synthetic construct
  REGION 1..9: note = short peptide
PQLPQSSQL

SEQ ID NO: 3406 - protein, 9 aa, synthetic construct
  REGION 1..9: note = short peptide
GTCLFVAVK

SEQ ID NO: 3407 - protein, 10 aa, synthetic construct
  REGION 1..10: note = short peptide
NVADVSVLQK

SEQ ID NO: 3408 - protein, 8 aa, synthetic construct
  REGION 1..8: note = short peptide
HTGPITCL

SEQ ID NO: 3409 - protein, 9 aa, synthetic construct
  REGION 1..9: note = short peptide
HQHIGKPST

SEQ ID NO: 3410 - protein, 9 aa, synthetic construct
  REGION 1..9: note = short peptide
APKIANGKA

SEQ ID NO: 3411 - protein, 10 aa, synthetic construct
  REGION 1..10: note = short peptide
GPQGHHRSCL

SEQ ID NO: 3412 - protein, 10 aa, synthetic construct
  REGION 1..10: note = short peptide
AVCAKRFTQK

SEQ ID NO: 3413 - protein, 10 aa, synthetic construct
  REGION 1..10: note = short peptide
KVCDLKWIHR

SEQ ID NO: 3414 - protein, 13 aa, synthetic construct
  REGION 1..13: note = short peptide
HMINGFTALALTK

SEQ ID NO: 3415 - protein, 8 aa, synthetic construct
  REGION 1..8: note = short peptide
ESKTHQCL

SEQ ID NO: 3416 - protein, 9 aa, synthetic construct
  REGION 1..9: note = short peptide
EHIKACEAF

SEQ ID NO: 3417 - protein, 9 aa, synthetic construct
  REGION 1..9: note = short peptide
HHNKLRLCF

SEQ ID NO: 3418 - protein, 10 aa, synthetic construct
  REGION 1..10: note = short peptide
RPSHKRCIVI

SEQ ID NO: 3419 - protein, 9 aa, synthetic construct
  REGION 1..9: note = short peptide
KINKNCWRI

SEQ ID NO: 3420 - protein, 10 aa, synthetic construct
  REGION 1..10: note = short peptide
KLKDEGCRAF

SEQ ID NO: 3421 - protein, 12 aa, synthetic construct
  REGION 1..12: note = short peptide
MPHGGQADDEVL

SEQ ID NO: 3422 - protein, 9 aa, synthetic construct
  REGION 1..9: note = short peptide
KLYPWIHQF

SEQ ID NO: 3423 - protein, 9 aa, synthetic construct
  REGION 1..9: note = short peptide
KWIDTQVVL

SEQ ID NO: 3424 - protein, 10 aa, synthetic construct
  REGION 1..10: note = short peptide
PNVNLPNVNL

SEQ ID NO: 3425 - protein, 14 aa, synthetic construct
  REGION 1..14: note = short peptide
KNLGIPKPFGPQIK

SEQ ID NO: 3426 - protein, 10 aa, synthetic construct
  REGION 1..10: note = short peptide
TGGGNALQAI

SEQ ID NO: 3427 - protein, 8 aa, synthetic construct
  REGION 1..8: note = short peptide
CGGGGRVY

SEQ ID NO: 3428 - protein, 9 aa, synthetic construct
  REGION 1..9: note = short peptide
STVHEILCK

SEQ ID NO: 3429 - protein, 10 aa, synthetic construct
  REGION 1..10: note = short peptide
TTDCLQILAY

SEQ ID NO: 3430 - protein, 11 aa, synthetic construct
  REGION 1..11: note = short peptide
TVGNVLTLLAL

SEQ ID NO: 3431 - protein, 10 aa, synthetic construct
  REGION 1..10: note = short peptide
STDVKGCSMY

SEQ ID NO: 3432 - protein, 15 aa, synthetic construct
  REGION 1..15: note = short peptide
ENDYYCSLMKSIVDY

SEQ ID NO: 3433 - protein, 8 aa, synthetic construct
  REGION 1..8: note = short peptide
KGRGQKEK

SEQ ID NO: 3434 - protein, 10 aa, synthetic construct
  REGION 1..10: note = short peptide
ALRDNSTMGY

SEQ ID NO: 3435 - protein, 12 aa, synthetic construct
  REGION 1..12: note = short peptide
SRGGGGGSRGGA

SEQ ID NO: 3436 - protein, 10 aa, synthetic construct
  REGION 1..10: note = short peptide
ALRDNSTMGY

SEQ ID NO: 3437 - protein, 12 aa, synthetic construct
  REGION 1..12: note = short peptide
ETRPAGDGTFQK

SEQ ID NO: 3438 - protein, 10 aa, synthetic construct
  REGION 1..10: note = short peptide
SVHILSDVQF

SEQ ID NO: 3439 - protein, 8 aa, synthetic construct
  REGION 1..8: note = short peptide
SNPKPLVL

SEQ ID NO: 3440 - protein, 10 aa, synthetic construct
  REGION 1..10: note = short peptide
MPLGSAVDIL

SEQ ID NO: 3441 - protein, 8 aa, synthetic construct
  REGION 1..8: note = short peptide
KHAPPTYE

SEQ ID NO: 3442 - protein, 9 aa, synthetic construct
  REGION 1..9: note = short peptide
STTNQSISK

SEQ ID NO: 3443 - protein, 9 aa, synthetic construct
  REGION 1..9: note = short peptide
SPGAEGNAP

SEQ ID NO: 3444 - protein, 15 aa, synthetic construct
  REGION 1..15: note = short peptide
VIQHFQEKVESLEQE

SEQ ID NO: 3445 - protein, 9 aa, synthetic construct
  REGION 1..9: note = short peptide
DVIGVTKGK

SEQ ID NO: 3446 - protein, 8 aa, synthetic construct
  REGION 1..8: note = short peptide
KGTGARPY

SEQ ID NO: 3447 - protein, 9 aa, synthetic construct
  REGION 1..9: note = short peptide
KGTATEPLM

SEQ ID NO: 3448 - protein, 10 aa, synthetic construct
  REGION 1..10: note = short peptide
KGRVAIAVAI

SEQ ID NO: 3449 - protein, 8 aa, synthetic construct
  REGION 1..8: note = short peptide
ESAANLTQ

SEQ ID NO: 3450 - protein, 10 aa, synthetic construct
  REGION 1..10: note = short peptide
MPYDTPVPGY

SEQ ID NO: 3451 - protein, 9 aa, synthetic construct
  REGION 1..9: note = short peptide
MPTLPPPSV

SEQ ID NO: 3452 - protein, 15 aa, synthetic construct
  REGION 1..15: note = short peptide
VLSPADKTNVKAAWG

SEQ ID NO: 3453 - protein, 12 aa, synthetic construct
  REGION 1..12: note = short peptide
VLSPADKTNVKA

SEQ ID NO: 3454 - protein, 10 aa, synthetic construct
  REGION 1..10: note = short peptide
KYLQAKLTQF

SEQ ID NO: 3455 - protein, 12 aa, synthetic construct
  REGION 1..12: note = short peptide
SSFGSRSDSRGK

SEQ ID NO: 3456 - protein, 10 aa, synthetic construct
  REGION 1..10: note = short peptide
KPRKAVRVLL

SEQ ID NO: 3457 - protein, 9 aa, synthetic construct
  REGION 1..9: note = short peptide
SSDDSKEDY

SEQ ID NO: 3458 - protein, 12 aa, synthetic construct
  REGION 1..12: note = short peptide
MPVGPNAHKVPP

SEQ ID NO: 3459 - protein, 9 aa, synthetic construct
  REGION 1..9: note = short peptide
KYPDRVPVI

SEQ ID NO: 3460 - protein, 9 aa, synthetic construct
  REGION 1..9: note = short peptide
MPVGLIAGA

SEQ ID NO: 3461 - protein, 9 aa, synthetic construct
  REGION 1..9: note = short peptide
EHYKNSTVM

SEQ ID NO: 3462 - protein, 11 aa, synthetic construct
  REGION 1..11: note = short peptide
KPSDTLSLTCA

SEQ ID NO: 3463 - protein, 11 aa, synthetic construct
  REGION 1..11: note = short peptide
SPRHALTSPSL

SEQ ID NO: 3464 - protein, 11 aa, synthetic construct
  REGION 1..11: note = short peptide
KGPLATGGIKK

SEQ ID NO: 3465 - protein, 9 aa, synthetic construct
  REGION 1..9: note = short peptide
SSVSPAVSK

SEQ ID NO: 3466 - protein, 10 aa, synthetic construct
  REGION 1..10: note = short peptide
MPPQNVGEVY

SEQ ID NO: 3467 - protein, 9 aa, synthetic construct
  REGION 1..9: note = short peptide
EGAGRGGPR

SEQ ID NO: 3468 - protein, 8 aa, synthetic construct
  REGION 1..8: note = short peptide
KEQALSTL

SEQ ID NO: 3469 - protein, 9 aa, synthetic construct
  REGION 1..9: note = short peptide
LANVTHLLI

SEQ ID NO: 3470 - protein, 11 aa, synthetic construct
  REGION 1..11: note = short peptide
KPSDTLSLTCA

SEQ ID NO: 3471 - protein, 9 aa, synthetic construct
  REGION 1..9: note = short peptide
KPMHPENKL

SEQ ID NO: 3472 - protein, 12 aa, synthetic construct
  REGION 1..12: note = short peptide
SPRPSGPGPSSF

SEQ ID NO: 3473 - protein, 11 aa, synthetic construct
  REGION 1..11: note = short peptide
MPSPIMHPLIL

SEQ ID NO: 3474 - protein, 10 aa, synthetic construct
  REGION 1..10: note = short peptide
VLYEGPVRGL

SEQ ID NO: 3475 - protein, 9 aa, synthetic construct
  REGION 1..9: note = short peptide
KYTKIFNDF

SEQ ID NO: 3476 - protein, 12 aa, synthetic construct
  REGION 1..12: note = short peptide
SSLRAPTVPPPL

SEQ ID NO: 3477 - protein, 15 aa, synthetic construct
  REGION 1..15: note = short peptide
LGEEKGGASLSPQYV

SEQ ID NO: 3478 - protein, 9 aa, synthetic construct
  REGION 1..9: note = short peptide
KLKIMTDLL

SEQ ID NO: 3479 - protein, 10 aa, synthetic construct
  REGION 1..10: note = short peptide
KLKKTETQEK

SEQ ID NO: 3480 - protein, 10 aa, synthetic construct
  REGION 1..10: note = short peptide
TLSDNGIHHC

SEQ ID NO: 3481 - protein, 9 aa, synthetic construct
  REGION 1..9: note = short peptide
APVPGQPMP

SEQ ID NO: 3482 - protein, 14 aa, synthetic construct
  REGION 1..14: note = short peptide
ATTVSTQRGPVYIG

SEQ ID NO: 3483 - protein, 13 aa, synthetic construct
  REGION 1..13: note = short peptide
LVVDNGSGMCKAG

SEQ ID NO: 3484 - protein, 11 aa, synthetic construct
  REGION 1..11: note = short peptide
APWPPKGLVPA

SEQ ID NO: 3485 - protein, 11 aa, synthetic construct
  REGION 1..11: note = short peptide
LVNVSGKFFEY

SEQ ID NO: 3486 - protein, 9 aa, synthetic construct
  REGION 1..9: note = short peptide
TMGINGSAY

SEQ ID NO: 3487 - protein, 9 aa, synthetic construct
  REGION 1..9: note = short peptide
TVLDLISCR

SEQ ID NO: 3488 - protein, 9 aa, synthetic construct
  REGION 1..9: note = short peptide
APRPPPMIV

SEQ ID NO: 3489 - protein, 11 aa, synthetic construct
  REGION 1..11: note = short peptide
LNALAGLDPDE

SEQ ID NO: 3490 - protein, 9 aa, synthetic construct
  REGION 1..9: note = short peptide
TKKNKKKPP

SEQ ID NO: 3491 - protein, 12 aa, synthetic construct
  REGION 1..12: note = short peptide
MESEQLFHRGYY

SEQ ID NO: 3492 - protein, 13 aa, synthetic construct
  REGION 1..13: note = short peptide
AVFEWHITKGGNI

SEQ ID NO: 3493 - protein, 10 aa, synthetic construct
  REGION 1..10: note = short peptide
KLFDHAVSKF

SEQ ID NO: 3494 - protein, 10 aa, synthetic construct
  REGION 1..10: note = short peptide
MDVNIAPLRA

SEQ ID NO: 3495 - protein, 9 aa, synthetic construct
  REGION 1..9: note = short peptide
TVTEVLLKY

SEQ ID NO: 3496 - protein, 12 aa, synthetic construct
  REGION 1..12: note = short peptide
TLARIIAQGLIK

SEQ ID NO: 3497 - protein, 9 aa, synthetic construct
  REGION 1..9: note = short peptide
TLCDLYDTL

SEQ ID NO: 3498 - protein, 9 aa, synthetic construct
  REGION 1..9: note = short peptide
KMVGNVTGA

SEQ ID NO: 3499 - protein, 9 aa, synthetic construct
  REGION 1..9: note = short peptide
ARGPKKHLK

SEQ ID NO: 3500 - protein, 15 aa, synthetic construct
  REGION 1..15: note = short peptide
TQIFKTNTQTYRESL

SEQ ID NO: 3501 - protein, 9 aa, synthetic construct
  REGION 1..9: note = short peptide
KMPKVKMPK

SEQ ID NO: 3502 - protein, 12 aa, synthetic construct
  REGION 1..12: note = short peptide
TQYLPFIRGQEN

SEQ ID NO: 3503 - protein, 15 aa, synthetic construct
  REGION 1..15: note = short peptide
ASGNARIGKPAPDFK

SEQ ID NO: 3504 - protein, 12 aa, synthetic construct
  REGION 1..12: note = short peptide
KMKETIPLTAEK

SEQ ID NO: 3505 - protein, 10 aa, synthetic construct
  REGION 1..10: note = short peptide
LPSPVTAQKY

SEQ ID NO: 3506 - protein, 9 aa, synthetic construct
  REGION 1..9: note = short peptide
TRVPMDERF

SEQ ID NO: 3507 - protein, 10 aa, synthetic construct
  REGION 1..10: note = short peptide
KMPKMKMPTF

SEQ ID NO: 3508 - protein, 9 aa, synthetic construct
  REGION 1..9: note = short peptide
TPRSPDSTA

SEQ ID NO: 3509 - protein, 9 aa, synthetic construct
  REGION 1..9: note = short peptide
KMVGNVTGA

SEQ ID NO: 3510 - protein, 11 aa, synthetic construct
  REGION 1..11: note = short peptide
ATHGQTCARPM

SEQ ID NO: 3511 - protein, 9 aa, synthetic construct
  REGION 1..9: note = short peptide
LPNQNGTVL

SEQ ID NO: 3512 - protein, 10 aa, synthetic construct
  REGION 1..10: note = short peptide
TPAPHSPWTA

SEQ ID NO: 3513 - protein, 12 aa, synthetic construct
  REGION 1..12: note = short peptide
KLPGKGKSTMKK

SEQ ID NO: 3514 - protein, 13 aa, synthetic construct
  REGION 1..13: note = short peptide
LSHGSAQVKGHGK

SEQ ID NO: 3515 - protein, 10 aa, synthetic construct
  REGION 1..10: note = short peptide
ATAYLPMLEK

SEQ ID NO: 3516 - protein, 9 aa, synthetic construct
  REGION 1..9: note = short peptide
LSSPQHSPV

SEQ ID NO: 3517 - protein, 9 aa, synthetic construct
  REGION 1..9: note = short peptide
LSINVTNTR

SEQ ID NO: 3518 - protein, 9 aa, synthetic construct
  REGION 1..9: note = short peptide
KKWGKSKKK

SEQ ID NO: 3519 - protein, 10 aa, synthetic construct
  REGION 1..10: note = short peptide
TYEEVGDDAL

SEQ ID NO: 3520 - protein, 9 aa, synthetic construct
  REGION 1..9: note = short peptide
ANFSHATSF

SEQ ID NO: 3521 - protein, 10 aa, synthetic construct
  REGION 1..10: note = short peptide
KPEEANEPPL

SEQ ID NO: 3522 - protein, 11 aa, synthetic construct
  REGION 1..11: note = short peptide
TAGLRAAMGPG

SEQ ID NO: 3523 - protein, 9 aa, synthetic construct
  REGION 1..9: note = short peptide
KPEDGGLKK

SEQ ID NO: 3524 - protein, 10 aa, synthetic construct
  REGION 1..10: note = short peptide
DIPNPLIAGI

SEQ ID NO: 3525 - protein, 10 aa, synthetic construct
  REGION 1..10: note = short peptide
TASTGKTFPG

SEQ ID NO: 3526 - protein, 9 aa, synthetic construct
  REGION 1..9: note = short peptide
KINPFILHI

SEQ ID NO: 3527 - protein, 10 aa, synthetic construct
  REGION 1..10: note = short peptide
MPFDPSKVVA

SEQ ID NO: 3528 - protein, 10 aa, synthetic construct
  REGION 1..10: note = short peptide
TATAVAHCKR

SEQ ID NO: 3529 - protein, 11 aa, synthetic construct
  REGION 1..11: note = short peptide
MPESEEIAQLL

SEQ ID NO: 3530 - protein, 9 aa, synthetic construct
  REGION 1..9: note = short peptide
KIKSFEVVF

SEQ ID NO: 3531 - protein, 10 aa, synthetic construct
  REGION 1..10: note = short peptide
KITPPPGATK

SEQ ID NO: 3532 - protein, 10 aa, synthetic construct
  REGION 1..10: note = short peptide
MPHLVNGDAA

SEQ ID NO: 3533 - protein, 10 aa, synthetic construct
  REGION 1..10: note = short peptide
KIFNVAIPRF

SEQ ID NO: 3534 - protein, 9 aa, synthetic construct
  REGION 1..9: note = short peptide
SYLNGTFRL

SEQ ID NO: 3535 - protein, 10 aa, synthetic construct
  REGION 1..10: note = short peptide
DLVNRSIAQM

SEQ ID NO: 3536 - protein, 8 aa, synthetic construct
  REGION 1..8: note = short peptide
AMVSEFLK

SEQ ID NO: 3537 - protein, 10 aa, synthetic construct
  REGION 1..10: note = short peptide
MPGLETAVVF

SEQ ID NO: 3538 - protein, 13 aa, synthetic construct
  REGION 1..13: note = short peptide
MPFSPYEPLNFHA

SEQ ID NO: 3539 - protein, 9 aa, synthetic construct
  REGION 1..9: note = short peptide
DMKTKYFFF

SEQ ID NO: 3540 - protein, 8 aa, synthetic construct
  REGION 1..8: note = short peptide
TDENIKRK

SEQ ID NO: 3541 - protein, 9 aa, synthetic construct
  REGION 1..9: note = short peptide
TYGEIFEKF

SEQ ID NO: 3542 - protein, 8 aa, synthetic construct
  REGION 1..8: note = short peptide
TGKTTFVK

SEQ ID NO: 3543 - protein, 13 aa, synthetic construct
  REGION 1..13: note = short peptide
TGGKAPRKQLATK

SEQ ID NO: 3544 - protein, 10 aa, synthetic construct
  REGION 1..10: note = short peptide
MMGHRPVLVL

SEQ ID NO: 3545 - protein, 13 aa, synthetic construct
  REGION 1..13: note = short peptide
TGGKAPRKQLATK

SEQ ID NO: 3546 - protein, 9 aa, synthetic construct
  REGION 1..9: note = short peptide
TGHLVTKVV

SEQ ID NO: 3547 - protein, 8 aa, synthetic construct
  REGION 1..8: note = short peptide
CPQGPQGR

SEQ ID NO: 3548 - protein, 11 aa, synthetic construct
  REGION 1..11: note = short peptide
TGKTFPGFFSP

SEQ ID NO: 3549 - protein, 15 aa, synthetic construct
  REGION 1..15: note = short peptide
TYSLGSALRPSTSRS

SEQ ID NO: 3550 - protein, 11 aa, synthetic construct
  REGION 1..11: note = short peptide
KKSGPTVTKVV

SEQ ID NO: 3551 - protein, 8 aa, synthetic construct
  REGION 1..8: note = short peptide
APLRGTVM

SEQ ID NO: 3552 - protein, 9 aa, synthetic construct
  REGION 1..9: note = short peptide
KKSKTLFSL

SEQ ID NO: 3553 - protein, 13 aa, synthetic construct
  REGION 1..13: note = short peptide
TGGKAPRKQLATK

SEQ ID NO: 3554 - protein, 8 aa, synthetic construct
  REGION 1..8: note = short peptide
MPDIPQII

SEQ ID NO: 3555 - protein, 15 aa, synthetic construct
  REGION 1..15: note = short peptide
TEKLVTSKGDKELRT

SEQ ID NO: 3556 - protein, 15 aa, synthetic construct
  REGION 1..15: note = short peptide
VDSKGFDEYMKELGV

SEQ ID NO: 3557 - protein, 15 aa, synthetic construct
  REGION 1..15: note = short peptide
TESRGSESGIFTNTK

SEQ ID NO: 3558 - protein, 10 aa, synthetic construct
  REGION 1..10: note = short peptide
MPAMAPNETL

SEQ ID NO: 3559 - protein, 9 aa, synthetic construct
  REGION 1..9: note = short peptide
MPADSGYPA

SEQ ID NO: 3560 - protein, 8 aa, synthetic construct
  REGION 1..8: note = short peptide
KKHQKIYL

SEQ ID NO: 3561 - protein, 9 aa, synthetic construct
  REGION 1..9: note = short peptide
TGAGFVRVP

SEQ ID NO: 3562 - protein, 13 aa, synthetic construct
  REGION 1..13: note = short peptide
EVYQILEKGAAKR

SEQ ID NO: 3563 - protein, 14 aa, synthetic construct
  REGION 1..14: note = short peptide
QALAAQAAAAAHAA

SEQ ID NO: 3564 - protein, 10 aa, synthetic construct
  REGION 1..10: note = short peptide
GPRGGLGGGM

SEQ ID NO: 3565 - protein, 10 aa, synthetic construct
  REGION 1..10: note = short peptide
HTNTSHVMQY

SEQ ID NO: 3566 - protein, 9 aa, synthetic construct
  REGION 1..9: note = short peptide
RTNWPNTGK

SEQ ID NO: 3567 - protein, 10 aa, synthetic construct
  REGION 1..10: note = short peptide
GLNVSSISRK

SEQ ID NO: 3568 - protein, 9 aa, synthetic construct
  REGION 1..9: note = short peptide
RVNIPKVLR

SEQ ID NO: 3569 - protein, 9 aa, synthetic construct
  REGION 1..9: note = short peptide
QLATKAARK

SEQ ID NO: 3570 - protein, 9 aa, synthetic construct
  REGION 1..9: note = short peptide
YHSDDYIKF

SEQ ID NO: 3571 - protein, 9 aa, synthetic construct
  REGION 1..9: note = short peptide
HSIIPGHPA

SEQ ID NO: 3572 - protein, 8 aa, synthetic construct
  REGION 1..8: note = short peptide
YPEGKDVL

SEQ ID NO: 3573 - protein, 9 aa, synthetic construct
  REGION 1..9: note = short peptide
QSNETALHY

SEQ ID NO: 3574 - protein, 15 aa, synthetic construct
  REGION 1..15: note = short peptide
GPSVPKMMNLKGNPE

SEQ ID NO: 3575 - protein, 15 aa, synthetic construct
  REGION 1..15: note = short peptide
ADADADLEERLKNLR

SEQ ID NO: 3576 - protein, 9 aa, synthetic construct
  REGION 1..9: note = short peptide
QIFQRPIQH

SEQ ID NO: 3577 - protein, 13 aa, synthetic construct
  REGION 1..13: note = short peptide
WTFGDGSSNTTVR

SEQ ID NO: 3578 - protein, 8 aa, synthetic construct
  REGION 1..8: note = short peptide
GFAYILAW

SEQ ID NO: 3579 - protein, 9 aa, synthetic construct
  REGION 1..9: note = short peptide
SAYGSVKAY

SEQ ID NO: 3580 - protein, 10 aa, synthetic construct
  REGION 1..10: note = short peptide
SCVSAAKNEV

SEQ ID NO: 3581 - protein, 8 aa, synthetic construct
  REGION 1..8: note = short peptide
AEHIRKAG

SEQ ID NO: 3582 - protein, 8 aa, synthetic construct
  REGION 1..8: note = short peptide
YGGLNEKS

SEQ ID NO: 3583 - protein, 14 aa, synthetic construct
  REGION 1..14: note = short peptide
ADKTNVKAAWGKVG

SEQ ID NO: 3584 - protein, 15 aa, synthetic construct
  REGION 1..15: note = short peptide
GHKPPGSSEPITVKF

SEQ ID NO: 3585 - protein, 10 aa, synthetic construct
  REGION 1..10: note = short peptide
AEATPMLKTL

SEQ ID NO: 3586 - protein, 9 aa, synthetic construct
  REGION 1..9: note = short peptide
RHHLDPHRL

SEQ ID NO: 3587 - protein, 8 aa, synthetic construct
  REGION 1..8: note = short peptide
HDFGKGGA

SEQ ID NO: 3588 - protein, 10 aa, synthetic construct
  REGION 1..10: note = short peptide
YTNRTGAVYL

SEQ ID NO: 3589 - protein, 14 aa, synthetic construct
  REGION 1..14: note = short peptide
AALGSPSHTFRGLL

SEQ ID NO: 3590 - protein, 11 aa, synthetic construct
  REGION 1..11: note = short peptide
HAAERTVEDVF

SEQ ID NO: 3591 - protein, 10 aa, synthetic construct
  REGION 1..10: note = short peptide
HAAAPDPKCR

SEQ ID NO: 3592 - protein, 9 aa, synthetic construct
  REGION 1..9: note = short peptide
KTKDGVREV

SEQ ID NO: 3593 - protein, 14 aa, synthetic construct
  REGION 1..14: note = short peptide
AALTRDPQFQKLQQ

SEQ ID NO: 3594 - protein, 9 aa, synthetic construct
  REGION 1..9: note = short peptide
GVINGTYDY

SEQ ID NO: 3595 - protein, 10 aa, synthetic construct
  REGION 1..10: note = short peptide
HDPNTHHCLC

SEQ ID NO: 3596 - protein, 11 aa, synthetic construct
  REGION 1..11: note = short peptide
RIFAPNHVVAK

SEQ ID NO: 3597 - protein, 10 aa, synthetic construct
  REGION 1..10: note = short peptide
KTATAVAHCK

SEQ ID NO: 3598 - protein, 15 aa, synthetic construct
  REGION 1..15: note = short peptide
RLAPDYDALDVANKI

SEQ ID NO: 3599 - protein, 8 aa, synthetic construct
  REGION 1..8: note = short peptide
RKLVATKL

SEQ ID NO: 3600 - protein, 14 aa, synthetic construct
  REGION 1..14: note = short peptide
HFDLSHGSAQVKGH

SEQ ID NO: 3601 - protein, 15 aa, synthetic construct
  REGION 1..15: note = short peptide
HILSGTSCVPLGQCG

SEQ ID NO: 3602 - protein, 12 aa, synthetic construct
  REGION 1..12: note = short peptide
HPGIAEFPSRGK

SEQ ID NO: 3603 - protein, 15 aa, synthetic construct
  REGION 1..15: note = short peptide
KTNESVSEPRKGFMY

SEQ ID NO: 3604 - protein, 9 aa, synthetic construct
  REGION 1..9: note = short peptide
YPISPAVSR

SEQ ID NO: 3605 - protein, 9 aa, synthetic construct
  REGION 1..9: note = short peptide
HPVGSAVLP

SEQ ID NO: 3606 - protein, 9 aa, synthetic construct
  REGION 1..9: note = short peptide
RDQVLKVCA

SEQ ID NO: 3607 - protein, 9 aa, synthetic construct
  REGION 1..9: note = short peptide
GRPALVRLL

SEQ ID NO: 3608 - protein, 10 aa, synthetic construct
  REGION 1..10: note = short peptide
GRIKEIFCPK

SEQ ID NO: 3609 - protein, 9 aa, synthetic construct
  REGION 1..9: note = short peptide
RAQDLPLKK

SEQ ID NO: 3610 - protein, 11 aa, synthetic construct
  REGION 1..11: note = short peptide
RAPVPVRGGPK

SEQ ID NO: 3611 - protein, 9 aa, synthetic construct
  REGION 1..9: note = short peptide
RSHTGKYSI

SEQ ID NO: 3612 - protein, 10 aa, synthetic construct
  REGION 1..10: note = short peptide
RSINVTGQGF

SEQ ID NO: 3613 - protein, 9 aa, synthetic construct
  REGION 1..9: note = short peptide
GQTKPIFRK

SEQ ID NO: 3614 - protein, 9 aa, synthetic construct
  REGION 1..9: note = short peptide
HSASPASVR

SEQ ID NO: 3615 - protein, 10 aa, synthetic construct
  REGION 1..10: note = short peptide
GSASYSPPRK

SEQ ID NO: 3616 - protein, 9 aa, synthetic construct
  REGION 1..9: note = short peptide
RRTGYLRGR

SEQ ID NO: 3617 - protein, 10 aa, synthetic construct
  REGION 1..10: note = short peptide
RFIRPMGLRF

SEQ ID NO: 3618 - protein, 15 aa, synthetic construct
  REGION 1..15: note = short peptide
GTKDTVSTGLTGAVN

SEQ ID NO: 3619 - protein, 15 aa, synthetic construct
  REGION 1..15: note = short peptide
GTKDTVCSGVTGAAN

SEQ ID NO: 3620 - protein, 12 aa, synthetic construct
  REGION 1..12: note = short peptide
RQGNFFASPMLK

SEQ ID NO: 3621 - protein, 9 aa, synthetic construct
  REGION 1..9: note = short peptide
REKMTQIMF

SEQ ID NO: 3622 - protein, 9 aa, synthetic construct
  REGION 1..9: note = short peptide
AARVGAFLK

SEQ ID NO: 3623 - protein, 13 aa, synthetic construct
  REGION 1..13: note = short peptide
KSEDKVKAIANLY

SEQ ID NO: 3624 - protein, 11 aa, synthetic construct
  REGION 1..11: note = short peptide
RRIVVPPHLGY

SEQ ID NO: 3625 - protein, 8 aa, synthetic construct
  REGION 1..8: note = short peptide
AEIAKAEL

SEQ ID NO: 3626 - protein, 9 aa, synthetic construct
  REGION 1..9: note = short peptide
ASFDKAKLK

SEQ ID NO: 3627 - protein, 15 aa, synthetic construct
  REGION 1..15: note = short peptide
FKRGADPGMPEPTVL

SEQ ID NO: 3628 - protein, 8 aa, synthetic construct
  REGION 1..8: note = short peptide
SLCATGGL

SEQ ID NO: 3629 - protein, 9 aa, synthetic construct
  REGION 1..9: note = short peptide
NQNSTSSHL

SEQ ID NO: 3630 - protein, 12 aa, synthetic construct
  REGION 1..12: note = short peptide
SLGSALRPSTSR

SEQ ID NO: 3631 - protein, 13 aa, synthetic construct
  REGION 1..13: note = short peptide
SLGSALRPSTSRS

SEQ ID NO: 3632 - protein, 8 aa, synthetic construct
  REGION 1..8: note = short peptide
NQISPLKK

SEQ ID NO: 3633 - protein, 10 aa, synthetic construct
  REGION 1..10: note = short peptide
AGALRRLGAR

SEQ ID NO: 3634 - protein, 10 aa, synthetic construct
  REGION 1..10: note = short peptide
VSSRKSSSPA

SEQ ID NO: 3635 - protein, 9 aa, synthetic construct
  REGION 1..9: note = short peptide
FAERSVAKL

SEQ ID NO: 3636 - protein, 8 aa, synthetic construct
  REGION 1..8: note = short peptide
VTATALKT

SEQ ID NO: 3637 - protein, 11 aa, synthetic construct
  REGION 1..11: note = short peptide
ITYNVNDTFHK

SEQ ID NO: 3638 - protein, 9 aa, synthetic construct
  REGION 1..9: note = short peptide
AGELTPEEE

SEQ ID NO: 3639 - protein, 13 aa, synthetic construct
  REGION 1..13: note = short peptide
FSNLTTIGGRSLY

SEQ ID NO: 3640 - protein, 15 aa, synthetic construct
  REGION 1..15: note = short peptide
SGLRPGTQVDPEIEL

SEQ ID NO: 3641 - protein, 10 aa, synthetic construct
  REGION 1..10: note = short peptide
PDGIGKLKKL

SEQ ID NO: 3642 - protein, 11 aa, synthetic construct
  REGION 1..11: note = short peptide
VTDEPPPGLVP

SEQ ID NO: 3643 - protein, 15 aa, synthetic construct
  REGION 1..15: note = short peptide
FPRGMNPTGTGAVSF

SEQ ID NO: 3644 - protein, 10 aa, synthetic construct
  REGION 1..10: note = short peptide
SLGPPRPAPA

SEQ ID NO: 3645 - protein, 9 aa, synthetic construct
  REGION 1..9: note = short peptide
NSIDKITQY

SEQ ID NO: 3646 - protein, 9 aa, synthetic construct
  REGION 1..9: note = short peptide
SHTNTSHVM

SEQ ID NO: 3647 - protein, 12 aa, synthetic construct
  REGION 1..12: note = short peptide
FGRGGAESHTFK

SEQ ID NO: 3648 - protein, 14 aa, synthetic construct
  REGION 1..14: note = short peptide
SHHPGIAEFPSRGK

SEQ ID NO: 3649 - protein, 15 aa, synthetic construct
  REGION 1..15: note = short peptide
FPIHGNNTDQITDIL

SEQ ID NO: 3650 - protein, 12 aa, synthetic construct
  REGION 1..12: note = short peptide
NVKNVSVKDVRR

SEQ ID NO: 3651 - protein, 11 aa, synthetic construct
  REGION 1..11: note = short peptide
NTVGLGLPMSR

SEQ ID NO: 3652 - protein, 9 aa, synthetic construct
  REGION 1..9: note = short peptide
SHAQTVVLC

SEQ ID NO: 3653 - protein, 9 aa, synthetic construct
  REGION 1..9: note = short peptide
FPQIEINKM

SEQ ID NO: 3654 - protein, 11 aa, synthetic construct
  REGION 1..11: note = short peptide
NVAVHVFRKAA

SEQ ID NO: 3655 - protein, 10 aa, synthetic construct
  REGION 1..10: note = short peptide
SIGVPIKVLH

SEQ ID NO: 3656 - protein, 13 aa, synthetic construct
  REGION 1..13: note = short peptide
FTDGITNKLIGCY

SEQ ID NO: 3657 - protein, 10 aa, synthetic construct
  REGION 1..10: note = short peptide
FTCKVPGLYY

SEQ ID NO: 3658 - protein, 8 aa, synthetic construct
  REGION 1..8: note = short peptide
SESKSGPE

SEQ ID NO: 3659 - protein, 9 aa, synthetic construct
  REGION 1..9: note = short peptide
FVPKDPIDL

SEQ ID NO: 3660 - protein, 9 aa, synthetic construct
  REGION 1..9: note = short peptide
KATGAATPK

SEQ ID NO: 3661 - protein, 12 aa, synthetic construct
  REGION 1..12: note = short peptide
SESKSGPEYASF

SEQ ID NO: 3662 - protein, 11 aa, synthetic construct
  REGION 1..11: note = short peptide
SKPHSEAGTAF

SEQ ID NO: 3663 - protein, 9 aa, synthetic construct
  REGION 1..9: note = short peptide
KDLEKYKDL

SEQ ID NO: 3664 - protein, 8 aa, synthetic construct
  REGION 1..8: note = short peptide
PPNLFKII

SEQ ID NO: 3665 - protein, 12 aa, synthetic construct
  REGION 1..12: note = short peptide
KVLRDNIQGITK

SEQ ID NO: 3666 - protein, 9 aa, synthetic construct
  REGION 1..9: note = short peptide
EVEEEGDVD

SEQ ID NO: 3667 - protein, 12 aa, synthetic construct
  REGION 1..12: note = short peptide
PQGAAGRGAGAL

SEQ ID NO: 3668 - protein, 12 aa, synthetic construct
  REGION 1..12: note = short peptide
SKPHSEAGTAFI

SEQ ID NO: 3669 - protein, 15 aa, synthetic construct
  REGION 1..15: note = short peptide
PFKLFEIDPTSGVVS

SEQ ID NO: 3670 - protein, 9 aa, synthetic construct
  REGION 1..9: note = short peptide
ITDDFVKQK

SEQ ID NO: 3671 - protein, 10 aa, synthetic construct
  REGION 1..10: note = short peptide
KQILTPMAQK

SEQ ID NO: 3672 - protein, 8 aa, synthetic construct
  REGION 1..8: note = short peptide
PFGAVRNI

SEQ ID NO: 3673 - protein, 14 aa, synthetic construct
  REGION 1..14: note = short peptide
SGEGDFLAEGGGVR

SEQ ID NO: 3674 - protein, 10 aa, synthetic construct
  REGION 1..10: note = short peptide
FLPRQPPMSL

SEQ ID NO: 3675 - protein, 11 aa, synthetic construct
  REGION 1..11: note = short peptide
NIDFPGHNYTT

SEQ ID NO: 3676 - protein, 12 aa, synthetic construct
  REGION 1..12: note = short peptide
PFLPGREPGANL

SEQ ID NO: 3677 - protein, 10 aa, synthetic construct
  REGION 1..10: note = short peptide
FHYNDTAGYF

SEQ ID NO: 3678 - protein, 9 aa, synthetic construct
  REGION 1..9: note = short peptide
KQNRPIPQW

SEQ ID NO: 3679 - protein, 9 aa, synthetic construct
  REGION 1..9: note = short peptide
SISRHSSLK

SEQ ID NO: 3680 - protein, 10 aa, synthetic construct
  REGION 1..10: note = short peptide
EVPVGGFKGR

SEQ ID NO: 3681 - protein, 9 aa, synthetic construct
  REGION 1..9: note = short peptide
EVKFEVSKW

SEQ ID NO: 3682 - protein, 11 aa, synthetic construct
  REGION 1..11: note = short peptide
EVIPYTPAMQR

SEQ ID NO: 3683 - protein, 12 aa, synthetic construct
  REGION 1..12: note = short peptide
AFYHPGVNGPPL

SEQ ID NO: 3684 - protein, 8 aa, synthetic construct
  REGION 1..8: note = short peptide
NAILRANL

SEQ ID NO: 3685 - protein, 11 aa, synthetic construct
  REGION 1..11: note = short peptide
ISDGMNSSAHY

SEQ ID NO: 3686 - protein, 9 aa, synthetic construct
  REGION 1..9: note = short peptide
FVHPNLTSL

SEQ ID NO: 3687 - protein, 8 aa, synthetic construct
  REGION 1..8: note = short peptide
SRAGPLCL

SEQ ID NO: 3688 - protein, 8 aa, synthetic construct
  REGION 1..8: note = short peptide
QLHIKCTI

SEQ ID NO: 3689 - protein, 9 aa, synthetic construct
  REGION 1..9: note = short peptide
CENVYHLVY

SEQ ID NO: 3690 - protein, 11 aa, synthetic construct
  REGION 1..11: note = short peptide
ARVKEVEEMCK

SEQ ID NO: 3691 - protein, 9 aa, synthetic construct
  REGION 1..9: note = short peptide
TVPGQAPLC

SEQ ID NO: 3692 - protein, 10 aa, synthetic construct
  REGION 1..10: note = short peptide
APIAVAPVCL

SEQ ID NO: 3693 - protein, 12 aa, synthetic construct
  REGION 1..12: note = short peptide
QPFSCRGILVVY

SEQ ID NO: 3694 - protein, 9 aa, synthetic construct
  REGION 1..9: note = short peptide
GQVIRVICI

SEQ ID NO: 3695 - protein, 9 aa, synthetic construct
  REGION 1..9: note = short peptide
HDLKRCQYV

SEQ ID NO: 3696 - protein, 9 aa, synthetic construct
  REGION 1..9: note = short peptide
IVNSCVFVH

SEQ ID NO: 3697 - protein, 10 aa, synthetic construct
  REGION 1..10: note = short peptide
IVNLPGCSAK

SEQ ID NO: 3698 - protein, 10 aa, synthetic construct
  REGION 1..10: note = short peptide
AECGLRILAF

SEQ ID NO: 3699 - protein, 10 aa, synthetic construct
  REGION 1..10: note = short peptide
ARYCDSLLKK

SEQ ID NO: 3700 - protein, 8 aa, synthetic construct
  REGION 1..8: note = short peptide
TNKAIVKK

SEQ ID NO: 3701 - protein, 11 aa, synthetic construct
  REGION 1..11: note = short peptide
NPFCEPVFVRY

SEQ ID NO: 3702 - protein, 8 aa, synthetic construct
  REGION 1..8: note = short peptide
HDCVVKLL

SEQ ID NO: 3703 - protein, 10 aa, synthetic construct
  REGION 1..10: note = short peptide
RRNKTHTLCR

SEQ ID NO: 3704 - protein, 10 aa, synthetic construct
  REGION 1..10: note = short peptide
RVKEVEEMCK

SEQ ID NO: 3705 - protein, 9 aa, synthetic construct
  REGION 1..9: note = short peptide
QLSGIVCTK

SEQ ID NO: 3706 - protein, 9 aa, synthetic construct
  REGION 1..9: note = short peptide
NTAELKICR

SEQ ID NO: 3707 - protein, 9 aa, synthetic construct
  REGION 1..9: note = short peptide
MLFPGCVHL

SEQ ID NO: 3708 - protein, 9 aa, synthetic construct
  REGION 1..9: note = short peptide
VGYNRFVLY

SEQ ID NO: 3709 - protein, 9 aa, synthetic construct
  REGION 1..9: note = short peptide
HAVGCGFRR

SEQ ID NO: 3710 - protein, 9 aa, synthetic construct
  REGION 1..9: note = short peptide
FVCEAILKV

SEQ ID NO: 3711 - protein, 9 aa, synthetic construct
  REGION 1..9: note = short peptide
FRNGLKLML

SEQ ID NO: 3712 - protein, 10 aa, synthetic construct
  REGION 1..10: note = short peptide
IVYCGQVFEK

SEQ ID NO: 3713 - protein, 9 aa, synthetic construct
  REGION 1..9: note = short peptide
ARSLVCLGV

SEQ ID NO: 3714 - protein, 9 aa, synthetic construct
  REGION 1..9: note = short peptide
FVVSCVPSW

SEQ ID NO: 3715 - protein, 9 aa, synthetic construct
  REGION 1..9: note = short peptide
QPTCPDHML

SEQ ID NO: 3716 - protein, 10 aa, synthetic construct
  REGION 1..10: note = short peptide
TPDINQLPPS

SEQ ID NO: 3717 - protein, 9 aa, synthetic construct
  REGION 1..9: note = short peptide
LTMPETCRY

SEQ ID NO: 3718 - protein, 13 aa, synthetic construct
  REGION 1..13: note = short peptide
TIISDPTCEITQN

SEQ ID NO: 3719 - protein, 9 aa, synthetic construct
  REGION 1..9: note = short peptide
GHHNCSESL

SEQ ID NO: 3720 - protein, 12 aa, synthetic construct
  REGION 1..12: note = short peptide
TIISDPTCEITQ

SEQ ID NO: 3721 - protein, 11 aa, synthetic construct
  REGION 1..11: note = short peptide
GVIIKQGCLLK

SEQ ID NO: 3722 - protein, 12 aa, synthetic construct
  REGION 1..12: note = short peptide
NSAQGSDVSLTA

SEQ ID NO: 3723 - protein, 8 aa, synthetic construct
  REGION 1..8: note = short peptide
HAACPVLV

SEQ ID NO: 3724 - protein, 8 aa, synthetic construct
  REGION 1..8: note = short peptide
SHDSTVCL

SEQ ID NO: 3725 - protein, 9 aa, synthetic construct
  REGION 1..9: note = short peptide
GHHNCSESL

SEQ ID NO: 3726 - protein, 13 aa, synthetic construct
  REGION 1..13: note = short peptide
TIISDPTCEITQN

SEQ ID NO: 3727 - protein, 13 aa, synthetic construct
  REGION 1..13: note = short peptide
QAASSNSAQGSDV

SEQ ID NO: 3728 - protein, 12 aa, synthetic construct
  REGION 1..12: note = short peptide
NQSEAGSHIIQR

SEQ ID NO: 3729 - protein, 12 aa, synthetic construct
  REGION 1..12: note = short peptide
NQSEAGSHIIQR

SEQ ID NO: 3730 - protein, 11 aa, synthetic construct
  REGION 1..11: note = short peptide
GEPGCTQAQVL

SEQ ID NO: 3731 - protein, 8 aa, synthetic construct
  REGION 1..8: note = short peptide
NNKLCSLY

SEQ ID NO: 3732 - protein, 9 aa, synthetic construct
  REGION 1..9: note = short peptide
SHCEIAVFI

SEQ ID NO: 3733 - protein, 9 aa, synthetic construct
  REGION 1..9: note = short peptide
SHCFHMHCI

SEQ ID NO: 3734 - protein, 13 aa, synthetic construct
  REGION 1..13: note = short peptide
GYIGSTYFERCLK

SEQ ID NO: 3735 - protein, 10 aa, synthetic construct
  REGION 1..10: note = short peptide
QAVHIRPVCR

SEQ ID NO: 3736 - protein, 10 aa, synthetic construct
  REGION 1..10: note = short peptide
QAVLAQTDVR

SEQ ID NO: 3737 - protein, 9 aa, synthetic construct
  REGION 1..9: note = short peptide
SHHIGDFCF

SEQ ID NO: 3738 - protein, 9 aa, synthetic construct
  REGION 1..9: note = short peptide
RRVIVCNTK

SEQ ID NO: 3739 - protein, 10 aa, synthetic construct
  REGION 1..10: note = short peptide
GAPLKLKCEL

SEQ ID NO: 3740 - protein, 9 aa, synthetic construct
  REGION 1..9: note = short peptide
GDAPRTLCV

SEQ ID NO: 3741 - protein, 9 aa, synthetic construct
  REGION 1..9: note = short peptide
CPSGRVYVL

SEQ ID NO: 3742 - protein, 9 aa, synthetic construct
  REGION 1..9: note = short peptide
GPDTKRVCL

SEQ ID NO: 3743 - protein, 8 aa, synthetic construct
  REGION 1..8: note = short peptide
YNNVKACL

SEQ ID NO: 3744 - protein, 9 aa, synthetic construct
  REGION 1..9: note = short peptide
RRLCLRLQY

SEQ ID NO: 3745 - protein, 9 aa, synthetic construct
  REGION 1..9: note = short peptide
APAPEVCAA

SEQ ID NO: 3746 - protein, 9 aa, synthetic construct
  REGION 1..9: note = short peptide
NVTCINSRW

SEQ ID NO: 3747 - protein, 9 aa, synthetic construct
  REGION 1..9: note = short peptide
LRRGSQALR

SEQ ID NO: 3748 - protein, 8 aa, synthetic construct
  REGION 1..8: note = short peptide
CEAEVRAA

SEQ ID NO: 3749 - protein, 11 aa, synthetic construct
  REGION 1..11: note = short peptide
NVSSVALGSRR

SEQ ID NO: 3750 - protein, 9 aa, synthetic construct
  REGION 1..9: note = short peptide
SPCHIEMIL

SEQ ID NO: 3751 - protein, 9 aa, synthetic construct
  REGION 1..9: note = short peptide
LRRGSQALR

SEQ ID NO: 3752 - protein, 9 aa, synthetic construct
  REGION 1..9: note = short peptide
GQRILVKCL

SEQ ID NO: 3753 - protein, 14 aa, synthetic construct
  REGION 1..14: note = short peptide
PAILQSAALPFCPE

SEQ ID NO: 3754 - protein, 11 aa, synthetic construct
  REGION 1..11: note = short peptide
GEFEPDGCLKI

SEQ ID NO: 3755 - protein, 9 aa, synthetic construct
  REGION 1..9: note = short peptide
MPSSACEAM

SEQ ID NO: 3756 - protein, 9 aa, synthetic construct
  REGION 1..9: note = short peptide
TLIICPPAI

SEQ ID NO: 3757 - protein, 11 aa, synthetic construct
  REGION 1..11: note = short peptide
GEATETALTCL

SEQ ID NO: 3758 - protein, 9 aa, synthetic construct
  REGION 1..9: note = short peptide
CVTGPQATR

SEQ ID NO: 3759 - protein, 9 aa, synthetic construct
  REGION 1..9: note = short peptide
MPAPCAQVM

SEQ ID NO: 3760 - protein, 8 aa, synthetic construct
  REGION 1..8: note = short peptide
GDVKFVCV

SEQ ID NO: 3761 - protein, 13 aa, synthetic construct
  REGION 1..13: note = short peptide
MPVEAKCINAVSF

SEQ ID NO: 3762 - protein, 14 aa, synthetic construct
  REGION 1..14: note = short peptide
VCTIISDPTCEITQ

SEQ ID NO: 3763 - protein, 10 aa, synthetic construct
  REGION 1..10: note = short peptide
FQQGCAKTLY

SEQ ID NO: 3764 - protein, 9 aa, synthetic construct
  REGION 1..9: note = short peptide
AVGKTCLLI

SEQ ID NO: 3765 - protein, 9 aa, synthetic construct
  REGION 1..9: note = short peptide
RVLPCKHEF

SEQ ID NO: 3766 - protein, 9 aa, synthetic construct
  REGION 1..9: note = short peptide
SDLPRGGCL

SEQ ID NO: 3767 - protein, 9 aa, synthetic construct
  REGION 1..9: note = short peptide
SSQPVLSSL

SEQ ID NO: 3768 - protein, 11 aa, synthetic construct
  REGION 1..11: note = short peptide
AVCGQVQHLQK

SEQ ID NO: 3769 - protein, 11 aa, synthetic construct
  REGION 1..11: note = short peptide
EASNGQICNGR

SEQ ID NO: 3770 - protein, 9 aa, synthetic construct
  REGION 1..9: note = short peptide
VPLPVKVCF

SEQ ID NO: 3771 - protein, 10 aa, synthetic construct
  REGION 1..10: note = short peptide
YLLPDTCFRM

SEQ ID NO: 3772 - protein, 11 aa, synthetic construct
  REGION 1..11: note = short peptide
KPSETLSLTCA

SEQ ID NO: 3773 - protein, 9 aa, synthetic construct
  REGION 1..9: note = short peptide
DVRDECSKY

SEQ ID NO: 3774 - protein, 9 aa, synthetic construct
  REGION 1..9: note = short peptide
HRDCVRYLL

SEQ ID NO: 3775 - protein, 10 aa, synthetic construct
  REGION 1..10: note = short peptide
KRMDLVCQRM

SEQ ID NO: 3776 - protein, 10 aa, synthetic construct
  REGION 1..10: note = short peptide
KRKENCTLQF

SEQ ID NO: 3777 - protein, 12 aa, synthetic construct
  REGION 1..12: note = short peptide
DTVCGLPTGTSR

SEQ ID NO: 3778 - protein, 10 aa, synthetic construct
  REGION 1..10: note = short peptide
CLDPAQRTLY

SEQ ID NO: 3779 - protein, 10 aa, synthetic construct
  REGION 1..10: note = short peptide
STAALGCLVK

SEQ ID NO: 3780 - protein, 9 aa, synthetic construct
  REGION 1..9: note = short peptide
DVIDCFSML

SEQ ID NO: 3781 - protein, 10 aa, synthetic construct
  REGION 1..10: note = short peptide
RLGCFNLTVK

SEQ ID NO: 3782 - protein, 10 aa, synthetic construct
  REGION 1..10: note = short peptide
RLGCFNLTVK

SEQ ID NO: 3783 - protein, 8 aa, synthetic construct
  REGION 1..8: note = short peptide
VPPVVACV

SEQ ID NO: 3784 - protein, 10 aa, synthetic construct
  REGION 1..10: note = short peptide
DVLGDEICCW

SEQ ID NO: 3785 - protein, 9 aa, synthetic construct
  REGION 1..9: note = short peptide
APRLAVDCL

SEQ ID NO: 3786 - protein, 8 aa, synthetic construct
  REGION 1..8: note = short peptide
EGLRTSQL

SEQ ID NO: 3787 - protein, 9 aa, synthetic construct
  REGION 1..9: note = short peptide
EHACVVAGL

SEQ ID NO: 3788 - protein, 9 aa, synthetic construct
  REGION 1..9: note = short peptide
SLCQEINRV

SEQ ID NO: 3789 - protein, 11 aa, synthetic construct
  REGION 1..11: note = short peptide
TTEPCTDFFKY

SEQ ID NO: 3790 - protein, 9 aa, synthetic construct
  REGION 1..9: note = short peptide
EHLNCLVLL

SEQ ID NO: 3791 - protein, 9 aa, synthetic construct
  REGION 1..9: note = short peptide
HTACTNIAK

SEQ ID NO: 3792 - protein, 9 aa, synthetic construct
  REGION 1..9: note = short peptide
KPAPCAPSL

SEQ ID NO: 3793 - protein, 9 aa, synthetic construct
  REGION 1..9: note = short peptide
TQVIKVLNP

SEQ ID NO: 3794 - protein, 11 aa, synthetic construct
  REGION 1..11: note = short peptide
NHIISGTCASW

SEQ ID NO: 3795 - protein, 9 aa, synthetic construct
  REGION 1..9: note = short peptide
AVCGKVKCK

SEQ ID NO: 3796 - protein, 9 aa, synthetic construct
  REGION 1..9: note = short peptide
LLDCRPFLA

SEQ ID NO: 3797 - protein, 9 aa, synthetic construct
  REGION 1..9: note = short peptide
KPLPCEPEL

SEQ ID NO: 3798 - protein, 11 aa, synthetic construct
  REGION 1..11: note = short peptide
LLDGNSWLLCY

SEQ ID NO: 3799 - protein, 9 aa, synthetic construct
  REGION 1..9: note = short peptide
SDSCREVTV

SEQ ID NO: 3800 - protein, 8 aa, synthetic construct
  REGION 1..8: note = short peptide
EEKKKYCL

SEQ ID NO: 3801 - protein, 9 aa, synthetic construct
  REGION 1..9: note = short peptide
LLDSGFCSY

SEQ ID NO: 3802 - protein, 11 aa, synthetic construct
  REGION 1..11: note = short peptide
ALYDICFRTLK

SEQ ID NO: 3803 - protein, 10 aa, synthetic construct
  REGION 1..10: note = short peptide
WPVETCEERL

SEQ ID NO: 3804 - protein, 8 aa, synthetic construct
  REGION 1..8: note = short peptide
SLDCGHSF

SEQ ID NO: 3805 - protein, 12 aa, synthetic construct
  REGION 1..12: note = short peptide
SYISYQQKKFCF

SEQ ID NO: 3806 - protein, 11 aa, synthetic construct
  REGION 1..11: note = short peptide
KRWAKQGCAHF

SEQ ID NO: 3807 - protein, 8 aa, synthetic construct
  REGION 1..8: note = short peptide
SAHTKCKL

SEQ ID NO: 3808 - protein, 9 aa, synthetic construct
  REGION 1..9: note = short peptide
RYICKQQLI

SEQ ID NO: 3809 - protein, 8 aa, synthetic construct
  REGION 1..8: note = short peptide
KTRSQITK

SEQ ID NO: 3810 - protein, 14 aa, synthetic construct
  REGION 1..14: note = short peptide
DIKCVLNEGMPIYR

SEQ ID NO: 3811 - protein, 9 aa, synthetic construct
  REGION 1..9: note = short peptide
STSAATCTR

SEQ ID NO: 3812 - protein, 10 aa, synthetic construct
  REGION 1..10: note = short peptide
RPELLCGAVA

SEQ ID NO: 3813 - protein, 10 aa, synthetic construct
  REGION 1..10: note = short peptide
ALDCKGNVAY

SEQ ID NO: 3814 - protein, 8 aa, synthetic construct
  REGION 1..8: note = short peptide
AVQGGGAY

SEQ ID NO: 3815 - protein, 10 aa, synthetic construct
  REGION 1..10: note = short peptide
DLIDSCIQSF

SEQ ID NO: 3816 - protein, 9 aa, synthetic construct
  REGION 1..9: note = short peptide
DLIGCVIGR

SEQ ID NO: 3817 - protein, 9 aa, synthetic construct
  REGION 1..9: note = short peptide
CTDGVREQY

SEQ ID NO: 3818 - protein, 11 aa, synthetic construct
  REGION 1..11: note = short peptide
KVKCSGPGLER

SEQ ID NO: 3819 - protein, 10 aa, synthetic construct
  REGION 1..10: note = short peptide
SVCDPPPATK

SEQ ID NO: 3820 - protein, 10 aa, synthetic construct
  REGION 1..10: note = short peptide
HQACRNVAQY

SEQ ID NO: 3821 - protein, 11 aa, synthetic construct
  REGION 1..11: note = short peptide
ALFNPDVCWDR

SEQ ID NO: 3822 - protein, 11 aa, synthetic construct
  REGION 1..11: note = short peptide
KVCVNEEGIQK

SEQ ID NO: 3823 - protein, 11 aa, synthetic construct
  REGION 1..11: note = short peptide
ALLQDKATCPK

SEQ ID NO: 3824 - protein, 10 aa, synthetic construct
  REGION 1..10: note = short peptide
VSNPCRPLQY

SEQ ID NO: 3825 - protein, 9 aa, synthetic construct
  REGION 1..9: note = short peptide
KVCDKAFRR

SEQ ID NO: 3826 - protein, 9 aa, synthetic construct
  REGION 1..9: note = short peptide
KVCDKAFRH

SEQ ID NO: 3827 - protein, 9 aa, synthetic construct
  REGION 1..9: note = short peptide
KVCDKAFQR

SEQ ID NO: 3828 - protein, 13 aa, synthetic construct
  REGION 1..13: note = short peptide
KTVDDVLIHCQVI

SEQ ID NO: 3829 - protein, 10 aa, synthetic construct
  REGION 1..10: note = short peptide
RPSSASQCVA

SEQ ID NO: 3830 - protein, 11 aa, synthetic construct
  REGION 1..11: note = short peptide
RVADEGSFTCF

SEQ ID NO: 3831 - protein, 10 aa, synthetic construct
  REGION 1..10: note = short peptide
RYNHVCMVHR

SEQ ID NO: 3832 - protein, 9 aa, synthetic construct
  REGION 1..9: note = short peptide
ALCENTCLL

SEQ ID NO: 3833 - protein, 10 aa, synthetic construct
  REGION 1..10: note = short peptide
APYPVCTVRY

SEQ ID NO: 3834 - protein, 10 aa, synthetic construct
  REGION 1..10: note = short peptide
RLSYPACWEW

SEQ ID NO: 3835 - protein, 9 aa, synthetic construct
  REGION 1..9: note = short peptide
NETLPLHLY

SEQ ID NO: 3836 - protein, 9 aa, synthetic construct
  REGION 1..9: note = short peptide
STCLTSGLK

SEQ ID NO: 3837 - protein, 10 aa, synthetic construct
  REGION 1..10: note = short peptide
DSTLTCMQHY

SEQ ID NO: 3838 - protein, 10 aa, synthetic construct
  REGION 1..10: note = short peptide
KRWSDKVICK

SEQ ID NO: 3839 - protein, 9 aa, synthetic construct
  REGION 1..9: note = short peptide
SVTCHVKHY

SEQ ID NO: 3840 - protein, 9 aa, synthetic construct
  REGION 1..9: note = short peptide
DPQVNAFAI

SEQ ID NO: 3841 - protein, 9 aa, synthetic construct
  REGION 1..9: note = short peptide
KTFDSSCHF

SEQ ID NO: 3842 - protein, 10 aa, synthetic construct
  REGION 1..10: note = short peptide
YAVISQCIYR

SEQ ID NO: 3843 - protein, 9 aa, synthetic construct
  REGION 1..9: note = short peptide
RYTCVASNI

SEQ ID NO: 3844 - protein, 9 aa, synthetic construct
  REGION 1..9: note = short peptide
SLHKCFVRV

SEQ ID NO: 3845 - protein, 11 aa, synthetic construct
  REGION 1..11: note = short peptide
DPVTIDCGHVF

SEQ ID NO: 3846 - protein, 8 aa, synthetic construct
  REGION 1..8: note = short peptide
DPYCIVKV

SEQ ID NO: 3847 - protein, 9 aa, synthetic construct
  REGION 1..9: note = short peptide
LANQVSVCL

SEQ ID NO: 3848 - protein, 9 aa, synthetic construct
  REGION 1..9: note = short peptide
LARAPAACL

SEQ ID NO: 3849 - protein, 9 aa, synthetic construct
  REGION 1..9: note = short peptide
KSSDKSVCL

SEQ ID NO: 3850 - protein, 9 aa, synthetic construct
  REGION 1..9: note = short peptide
EHYSTCIKL

SEQ ID NO: 3851 - protein, 9 aa, synthetic construct
  REGION 1..9: note = short peptide
LPISGTCKA

SEQ ID NO: 3852 - protein, 11 aa, synthetic construct
  REGION 1..11: note = short peptide
VLCPQPTRQQK

SEQ ID NO: 3853 - protein, 13 aa, synthetic construct
  REGION 1..13: note = short peptide
LPIQPIPCKPVEY

SEQ ID NO: 3854 - protein, 8 aa, synthetic construct
  REGION 1..8: note = short peptide
DACHRQGL

SEQ ID NO: 3855 - protein, 9 aa, synthetic construct
  REGION 1..9: note = short peptide
LPKHCATTI

SEQ ID NO: 3856 - protein, 10 aa, synthetic construct
  REGION 1..10: note = short peptide
KLGEWVGLCK

SEQ ID NO: 3857 - protein, 9 aa, synthetic construct
  REGION 1..9: note = short peptide
DACHAYQII

SEQ ID NO: 3858 - protein, 10 aa, synthetic construct
  REGION 1..10: note = short peptide
KLCDHQLARW

SEQ ID NO: 3859 - protein, 9 aa, synthetic construct
  REGION 1..9: note = short peptide
DAALVDCSV

SEQ ID NO: 3860 - protein, 9 aa, synthetic construct
  REGION 1..9: note = short peptide
LPLPMACTL

SEQ ID NO: 3861 - protein, 10 aa, synthetic construct
  REGION 1..10: note = short peptide
FIFNCDIKTR

SEQ ID NO: 3862 - protein, 9 aa, synthetic construct
  REGION 1..9: note = short peptide
EVALRVPCL

SEQ ID NO: 3863 - protein, 8 aa, synthetic construct
  REGION 1..8: note = short peptide
AHENCLLY

SEQ ID NO: 3864 - protein, 9 aa, synthetic construct
  REGION 1..9: note = short peptide
CPFGGAFAL

SEQ ID NO: 3865 - protein, 10 aa, synthetic construct
  REGION 1..10: note = short peptide
TVAEITNACF

SEQ ID NO: 3866 - protein, 13 aa, synthetic construct
  REGION 1..13: note = short peptide
KLLETECPQYIRK

SEQ ID NO: 3867 - protein, 11 aa, synthetic construct
  REGION 1..11: note = short peptide
KLLAAHCIVGH

SEQ ID NO: 3868 - protein, 10 aa, synthetic construct
  REGION 1..10: note = short peptide
VLDNLKGDCY

SEQ ID NO: 3869 - protein, 10 aa, synthetic construct
  REGION 1..10: note = short peptide
TVCGKSFIRK

SEQ ID NO: 3870 - protein, 10 aa, synthetic construct
  REGION 1..10: note = short peptide
VIIKQGCLLK

SEQ ID NO: 3871 - protein, 9 aa, synthetic construct
  REGION 1..9: note = short peptide
YPHCVVHEL

SEQ ID NO: 3872 - protein, 8 aa, synthetic construct
  REGION 1..8: note = short peptide
THARPICL

SEQ ID NO: 3873 - protein, 10 aa, synthetic construct
  REGION 1..10: note = short peptide
YPVDDGCRIH

SEQ ID NO: 3874 - protein, 9 aa, synthetic construct
  REGION 1..9: note = short peptide
NMAQGFRTV

SEQ ID NO: 3875 - protein, 10 aa, synthetic construct
  REGION 1..10: note = short peptide
SLANWMCLAK

SEQ ID NO: 3876 - protein, 9 aa, synthetic construct
  REGION 1..9: note = short peptide
KIGTERACY

SEQ ID NO: 3877 - protein, 12 aa, synthetic construct
  REGION 1..12: note = short peptide
QSADLGPTLMTR

SEQ ID NO: 3878 - protein, 9 aa, synthetic construct
  REGION 1..9: note = short peptide
FPKKKCFVF

SEQ ID NO: 3879 - protein, 11 aa, synthetic construct
  REGION 1..11: note = short peptide
FPEDCLLTQVF

SEQ ID NO: 3880 - protein, 10 aa, synthetic construct
  REGION 1..10: note = short peptide
VHIRDVCVFL

SEQ ID NO: 3881 - protein, 10 aa, synthetic construct
  REGION 1..10: note = short peptide
FPSPGSCAVL

SEQ ID NO: 3882 - protein, 9 aa, synthetic construct
  REGION 1..9: note = short peptide
CAVIPQGQR

SEQ ID NO: 3883 - protein, 11 aa, synthetic construct
  REGION 1..11: note = short peptide
ATAGKDDCLLK

SEQ ID NO: 3884 - protein, 9 aa, synthetic construct
  REGION 1..9: note = short peptide
HECQELQRL

SEQ ID NO: 3885 - protein, 11 aa, synthetic construct
  REGION 1..11: note = short peptide
AHCDLGAHHSL

SEQ ID NO: 3886 - protein, 9 aa, synthetic construct
  REGION 1..9: note = short peptide
SEVCKFLSA

SEQ ID NO: 3887 - protein, 9 aa, synthetic construct
  REGION 1..9: note = short peptide
SETPLLPCY

SEQ ID NO: 3888 - protein, 11 aa, synthetic construct
  REGION 1..11: note = short peptide
FLKEDSQSCRV

SEQ ID NO: 3889 - protein, 11 aa, synthetic construct
  REGION 1..11: note = short peptide
QTAGCGSTFFR

SEQ ID NO: 3890 - protein, 15 aa, synthetic construct
  REGION 1..15: note = short peptide
ATCDAPVDNAGFLYK

SEQ ID NO: 3891 - protein, 10 aa, synthetic construct
  REGION 1..10: note = short peptide
THAAPCMLFM

SEQ ID NO: 3892 - protein, 9 aa, synthetic construct
  REGION 1..9: note = short peptide
FMCRKKVGL

SEQ ID NO: 3893 - protein, 10 aa, synthetic construct
  REGION 1..10: note = short peptide
QSNETALHYF

SEQ ID NO: 3894 - protein, 10 aa, synthetic construct
  REGION 1..10: note = short peptide
QSNETALHYF

SEQ ID NO: 3895 - protein, 8 aa, synthetic construct
  REGION 1..8: note = short peptide
TGVIASLQ

SEQ ID NO: 3896 - protein, 8 aa, synthetic construct
  REGION 1..8: note = short peptide
ESENVVCH

SEQ ID NO: 3897 - protein, 9 aa, synthetic construct
  REGION 1..9: note = short peptide
TEILHNIDP

SEQ ID NO: 3898 - protein, 11 aa, synthetic construct
  REGION 1..11: note = short peptide
TEFTPPGCISL

SEQ ID NO: 3899 - protein, 10 aa, synthetic construct
  REGION 1..10: note = short peptide
ERGQPCSQNY

SEQ ID NO: 3900 - protein, 11 aa, synthetic construct
  REGION 1..11: note = short peptide
VLWGPVCPLHA

SEQ ID NO: 3901 - protein, 9 aa, synthetic construct
  REGION 1..9: note = short peptide
REINGACSA

SEQ ID NO: 3902 - protein, 9 aa, synthetic construct
  REGION 1..9: note = short peptide
SSCHFFATK

SEQ ID NO: 3903 - protein, 10 aa, synthetic construct
  REGION 1..10: note = short peptide
TEALIRTCLL

SEQ ID NO: 3904 - protein, 9 aa, synthetic construct
  REGION 1..9: note = short peptide
LMSCTRSVY

SEQ ID NO: 3905 - protein, 13 aa, synthetic construct
  REGION 1..13: note = short peptide
HTADLCREKLVVR

SEQ ID NO: 3906 - protein, 11 aa, synthetic construct
  REGION 1..11: note = short peptide
EIIPASQFCPR

SEQ ID NO: 3907 - protein, 10 aa, synthetic construct
  REGION 1..10: note = short peptide
ATVSRCGMVW

SEQ ID NO: 3908 - protein, 8 aa, synthetic construct
  REGION 1..8: note = short peptide
RDTKKCAF

SEQ ID NO: 3909 - protein, 10 aa, synthetic construct
  REGION 1..10: note = short peptide
NIELGTACGK

SEQ ID NO: 3910 - protein, 11 aa, synthetic construct
  REGION 1..11: note = short peptide
ATSGCFTTAQK

SEQ ID NO: 3911 - protein, 13 aa, synthetic construct
  REGION 1..13: note = short peptide
ETEERMKCLYYLY

SEQ ID NO: 3912 - protein, 9 aa, synthetic construct
  REGION 1..9: note = short peptide
DAKLDKTCI

SEQ ID NO: 3913 - protein, 11 aa, synthetic construct
  REGION 1..11: note = short peptide
ETADILCPKAK

SEQ ID NO: 3914 - protein, 9 aa, synthetic construct
  REGION 1..9: note = short peptide
VLSDLCLFY

SEQ ID NO: 3915 - protein, 14 aa, synthetic construct
  REGION 1..14: note = short peptide
RTIQFVDWCPTGFK

SEQ ID NO: 3916 - protein, 11 aa, synthetic construct
  REGION 1..11: note = short peptide
LPECHLVKEEY

SEQ ID NO: 3917 - protein, 10 aa, synthetic construct
  REGION 1..10: note = short peptide
NAVGPPTTVR

SEQ ID NO: 3918 - protein, 10 aa, synthetic construct
  REGION 1..10: note = short peptide
NASLLGGVLR

SEQ ID NO: 3919 - protein, 8 aa, synthetic construct
  REGION 1..8: note = short peptide
KDSSVSCI

SEQ ID NO: 3920 - protein, 11 aa, synthetic construct
  REGION 1..11: note = short peptide
RISKDLANICK

SEQ ID NO: 3921 - protein, 11 aa, synthetic construct
  REGION 1..11: note = short peptide
RISKDLANICK

SEQ ID NO: 3922 - protein, 9 aa, synthetic construct
  REGION 1..9: note = short peptide
KLFTGSACR

SEQ ID NO: 3923 - protein, 11 aa, synthetic construct
  REGION 1..11: note = short peptide
KPCMTRHERSL

SEQ ID NO: 3924 - protein, 9 aa, synthetic construct
  REGION 1..9: note = short peptide
KITIPLACK

SEQ ID NO: 3925 - protein, 11 aa, synthetic construct
  REGION 1..11: note = short peptide
RVKEVEEMCKR

SEQ ID NO: 3926 - protein, 10 aa, synthetic construct
  REGION 1..10: note = short peptide
NVVGPWIQTK

SEQ ID NO: 3927 - protein, 11 aa, synthetic construct
  REGION 1..11: note = short peptide
NVFPLADGTVR

SEQ ID NO: 3928 - protein, 9 aa, synthetic construct
  REGION 1..9: note = short peptide
LVCSRYLQY

SEQ ID NO: 3929 - protein, 10 aa, synthetic construct
  REGION 1..10: note = short peptide
NVVINFDFPK

SEQ ID NO: 3930 - protein, 10 aa, synthetic construct
  REGION 1..10: note = short peptide
QTKGGQTWAR

SEQ ID NO: 3931 - protein, 9 aa, synthetic construct
  REGION 1..9: note = short peptide
KVQGTVHCF

SEQ ID NO: 3932 - protein, 11 aa, synthetic construct
  REGION 1..11: note = short peptide
KYKEAEPLCKR

SEQ ID NO: 3933 - protein, 8 aa, synthetic construct
  REGION 1..8: note = short peptide
SSVLRCGK

SEQ ID NO: 3934 - protein, 8 aa, synthetic construct
  REGION 1..8: note = short peptide
TETVVCAL

SEQ ID NO: 3935 - protein, 11 aa, synthetic construct
  REGION 1..11: note = short peptide
AEPTHVNEEKL

SEQ ID NO: 3936 - protein, 11 aa, synthetic construct
  REGION 1..11: note = short peptide
GRMHAPGKGLS

SEQ ID NO: 3937 - protein, 10 aa, synthetic construct
  REGION 1..10: note = short peptide
HHCEHLLERL

SEQ ID NO: 3938 - protein, 9 aa, synthetic construct
  REGION 1..9: note = short peptide
AVRELCFPR

SEQ ID NO: 3939 - protein, 9 aa, synthetic construct
  REGION 1..9: note = short peptide
GSRHPCITK

SEQ ID NO: 3940 - protein, 8 aa, synthetic construct
  REGION 1..8: note = short peptide
CEVTHQGL

SEQ ID NO: 3941 - protein, 15 aa, synthetic construct
  REGION 1..15: note = short peptide
ENDYYCSLMKSIVDY

SEQ ID NO: 3942 - protein, 12 aa, synthetic construct
  REGION 1..12: note = short peptide
ETRPAGDGTFQK

SEQ ID NO: 3943 - protein, 10 aa, synthetic construct
  REGION 1..10: note = short peptide
SVHILSDVQF

SEQ ID NO: 3944 - protein, 9 aa, synthetic construct
  REGION 1..9: note = short peptide
SPGAEGNAP

SEQ ID NO: 3945 - protein, 12 aa, synthetic construct
  REGION 1..12: note = short peptide
MPVGPNAHKVPP

SEQ ID NO: 3946 - protein, 11 aa, synthetic construct
  REGION 1..11: note = short peptide
KPSDTLSLTCA

SEQ ID NO: 3947 - protein, 11 aa, synthetic construct
  REGION 1..11: note = short peptide
KPSDTLSLTCA

SEQ ID NO: 3948 - protein, 10 aa, synthetic construct
  REGION 1..10: note = short peptide
TLSDNGIHHC

SEQ ID NO: 3949 - protein, 11 aa, synthetic construct
  REGION 1..11: note = short peptide
APWPPKGLVPA

SEQ ID NO: 3950 - protein, 11 aa, synthetic construct
  REGION 1..11: note = short peptide
LVNVSGKFFEY

SEQ ID NO: 3951 - protein, 9 aa, synthetic construct
  REGION 1..9: note = short peptide
TVLDLISCR

SEQ ID NO: 3952 - protein, 9 aa, synthetic construct
  REGION 1..9: note = short peptide
TLCDLYDTL

SEQ ID NO: 3953 - protein, 12 aa, synthetic construct
  REGION 1..12: note = short peptide
TQYLPFIRGQEN

SEQ ID NO: 3954 - protein, 11 aa, synthetic construct
  REGION 1..11: note = short peptide
ATHGQTCARPM

SEQ ID NO: 3955 - protein, 10 aa, synthetic construct
  REGION 1..10: note = short peptide
TPAPHSPWTA

SEQ ID NO: 3956 - protein, 10 aa, synthetic construct
  REGION 1..10: note = short peptide
TATAVAHCKR

SEQ ID NO: 3957 - protein, 15 aa, synthetic construct
  REGION 1..15: note = short peptide
TESRGSESGIFTNTK

SEQ ID NO: 3958 - protein, 14 aa, synthetic construct
  REGION 1..14: note = short peptide
QALAAQAAAAAHAA

SEQ ID NO: 3959 - protein, 10 aa, synthetic construct
  REGION 1..10: note = short peptide
HTNTSHVMQY

SEQ ID NO: 3960 - protein, 9 aa, synthetic construct
  REGION 1..9: note = short peptide
RTNWPNTGK

SEQ ID NO: 3961 - protein, 9 aa, synthetic construct
  REGION 1..9: note = short peptide
QSNETALHY

SEQ ID NO: 3962 - protein, 9 aa, synthetic construct
  REGION 1..9: note = short peptide
QSNETALHY

SEQ ID NO: 3963 - protein, 15 aa, synthetic construct
  REGION 1..15: note = short peptide
ADADADLEERLKNLR

SEQ ID NO: 3964 - protein, 10 aa, synthetic construct
  REGION 1..10: note = short peptide
SCVSAAKNEV

SEQ ID NO: 3965 - protein, 15 aa, synthetic construct
  REGION 1..15: note = short peptide
HILSGTSCVPLGQCG

SEQ ID NO: 3966 - protein, 9 aa, synthetic construct
  REGION 1..9: note = short peptide
HPVGSAVLP

SEQ ID NO: 3967 - protein, 9 aa, synthetic construct
  REGION 1..9: note = short peptide
RDQVLKVCA

SEQ ID NO: 3968 - protein, 11 aa, synthetic construct
  REGION 1..11: note = short peptide
NTVGLGLPMSR

SEQ ID NO: 3969 - protein, 13 aa, synthetic construct
  REGION 1..13: note = short peptide
FTDGITNKLIGCY

SEQ ID NO: 3970 - protein, 9 aa, synthetic construct
  REGION 1..9: note = short peptide
KQNRPIPQW

SEQ ID NO: 3971 - protein, 9 aa, synthetic construct
  REGION 1..9: note = short peptide
EVKFEVSKW

SEQ ID NO: 3972 - protein, 8 aa, synthetic construct
  REGION 1..8: note = short peptide
QLHIKCTI

SEQ ID NO: 3973 - protein, 8 aa, synthetic construct
  REGION 1..8: note = short peptide
QLHIKCTI

SEQ ID NO: 3974 - protein, 9 aa, synthetic construct
  REGION 1..9: note = short peptide
TVPGQAPLC

SEQ ID NO: 3975 - protein, 9 aa, synthetic construct
  REGION 1..9: note = short peptide
TVPGQAPLC

SEQ ID NO: 3976 - protein, 9 aa, synthetic construct
  REGION 1..9: note = short peptide
GHHNCSESL

SEQ ID NO: 3977 - protein, 9 aa, synthetic construct
  REGION 1..9: note = short peptide
GHHNCSESL

SEQ ID NO: 3978 - protein, 9 aa, synthetic construct
  REGION 1..9: note = short peptide
GHHNCSESL

SEQ ID NO: 3979 - protein, 9 aa, synthetic construct
  REGION 1..9: note = short peptide
GHHNCSESL

SEQ ID NO: 3980 - protein, 9 aa, synthetic construct
  REGION 1..9: note = short peptide
SHCFHMHCI

SEQ ID NO: 3981 - protein, 9 aa, synthetic construct
  REGION 1..9: note = short peptide
SHCFHMHCI

SEQ ID NO: 3982 - protein, 9 aa, synthetic construct
  REGION 1..9: note = short peptide
NVTCINSRW

SEQ ID NO: 3983 - protein, 9 aa, synthetic construct
  REGION 1..9: note = short peptide
NVTCINSRW

SEQ ID NO: 3984 - protein, 14 aa, synthetic construct
  REGION 1..14: note = short peptide
VCTIISDPTCEITQ

SEQ ID NO: 3985 - protein, 14 aa, synthetic construct
  REGION 1..14: note = short peptide
VCTIISDPTCEITQ

SEQ ID NO: 3986 - protein, 9 aa, synthetic construct
  REGION 1..9: note = short peptide
ALCENTCLL

SEQ ID NO: 3987 - protein, 9 aa, synthetic construct
  REGION 1..9: note = short peptide
ALCENTCLL

SEQ ID NO: 3988 - protein, 9 aa, synthetic construct
  REGION 1..9: note = short peptide
TEILHNIDP

SEQ ID NO: 3989 - protein, 9 aa, synthetic construct
  REGION 1..9: note = short peptide
TEILHNIDP

SEQ ID NO: 3990 - protein, 11 aa, synthetic construct
  REGION 1..11: note = short peptide
RISKDLANICK

SEQ ID NO: 3991 - protein, 11 aa, synthetic construct
  REGION 1..11: note = short peptide
RISKDLANICK

SEQ ID NO: 3992 - protein, 14 aa, synthetic construct
  REGION 1..14: note = short peptide
KTKDSGLPSQGLNF

SEQ ID NO: 3993 - protein, 9 aa, synthetic construct
  REGION 1..9: note = short peptide
VYLKAPMIL

SEQ ID NO: 3994 - protein, 10 aa, synthetic construct
  REGION 1..10: note = short peptide
TSPLQPLGPP

SEQ ID NO: 3995 - protein, 11 aa, synthetic construct
  REGION 1..11: note = short peptide
VPKALSPNSTI

SEQ ID NO: 3996 - protein, 9 aa, synthetic construct
  REGION 1..9: note = short peptide
YVQDRVPSY

SEQ ID NO: 3997 - protein, 9 aa, synthetic construct
  REGION 1..9: note = short peptide
VPLDPMEHV

SEQ ID NO: 3998 - protein, 8 aa, synthetic construct
  REGION 1..8: note = short peptide
KYAWVLDK

SEQ ID NO: 3999 - protein, 10 aa, synthetic construct
  REGION 1..10: note = short peptide
YTSYPMHDFY

SEQ ID NO: 4000 - protein, 10 aa, synthetic construct
  REGION 1..10: note = short peptide
KTKDGVREVF

SEQ ID NO: 4001 - protein, 10 aa, synthetic construct
  REGION 1..10: note = short peptide
VPNPMVHPSF

SEQ ID NO: 4002 - protein, 10 aa, synthetic construct
  REGION 1..10: note = short peptide
KTHTIQGTIK

SEQ ID NO: 4003 - protein, 12 aa, synthetic construct
  REGION 1..12: note = short peptide
KTHTLCRRCGSK

SEQ ID NO: 4004 - protein, 12 aa, synthetic construct
  REGION 1..12: note = short peptide
TTKNKVISFLGC

SEQ ID NO: 4005 - protein, 10 aa, synthetic construct
  REGION 1..10: note = short peptide
LPRGMQPTEF

SEQ ID NO: 4006 - protein, 9 aa, synthetic construct
  REGION 1..9: note = short peptide
KYIHSANVL

SEQ ID NO: 4007 - protein, 12 aa, synthetic construct
  REGION 1..12: note = short peptide
TTPPPTTTPSPP

SEQ ID NO: 4008 - protein, 9 aa, synthetic construct
  REGION 1..9: note = short peptide
VPVPRISVI

SEQ ID NO: 4009 - protein, 9 aa, synthetic construct
  REGION 1..9: note = short peptide
VEVNGGSAR

SEQ ID NO: 4010 - protein, 9 aa, synthetic construct
  REGION 1..9: note = short peptide
LLAPPARAL

SEQ ID NO: 4011 - protein, 10 aa, synthetic construct
  REGION 1..10: note = short peptide
VENLKFLCIG

SEQ ID NO: 4012 - protein, 13 aa, synthetic construct
  REGION 1..13: note = short peptide
VVDPGVVNTDVYK

SEQ ID NO: 4013 - protein, 9 aa, synthetic construct
  REGION 1..9: note = short peptide
KTWKGSIGL

SEQ ID NO: 4014 - protein, 8 aa, synthetic construct
  REGION 1..8: note = short peptide
YGNSFGAW

SEQ ID NO: 4015 - protein, 8 aa, synthetic construct
  REGION 1..8: note = short peptide
VDNKKPIL

SEQ ID NO: 4016 - protein, 10 aa, synthetic construct
  REGION 1..10: note = short peptide
LLEKMGLCYC

SEQ ID NO: 4017 - protein, 9 aa, synthetic construct
  REGION 1..9: note = short peptide
VAKMKKMEM

SEQ ID NO: 4018 - protein, 11 aa, synthetic construct
  REGION 1..11: note = short peptide
KTVSPPIRKGW

SEQ ID NO: 4019 - protein, 10 aa, synthetic construct
  REGION 1..10: note = short peptide
LIYDSSLCDL

SEQ ID NO: 4020 - protein, 12 aa, synthetic construct
  REGION 1..12: note = short peptide
KVATPKKASKPK

SEQ ID NO: 4021 - protein, 9 aa, synthetic construct
  REGION 1..9: note = short peptide
VYITRGQLM

SEQ ID NO: 4022 - protein, 9 aa, synthetic construct
  REGION 1..9: note = short peptide
VYDLLLEML

SEQ ID NO: 4023 - protein, 15 aa, synthetic construct
  REGION 1..15: note = short peptide
VHKAVLTIDEKGTEA

SEQ ID NO: 4024 - protein, 9 aa, synthetic construct
  REGION 1..9: note = short peptide
KVAVATPAK

SEQ ID NO: 4025 - protein, 12 aa, synthetic construct
  REGION 1..12: note = short peptide
YAFNGTQRFLER

SEQ ID NO: 4026 - protein, 9 aa, synthetic construct
  REGION 1..9: note = short peptide
VFNEKGWNY

SEQ ID NO: 4027 - protein, 14 aa, synthetic construct
  REGION 1..14: note = short peptide
VHVKDANGNSFATR

SEQ ID NO: 4028 - protein, 10 aa, synthetic construct
  REGION 1..10: note = short peptide
VVWPQPATTK

SEQ ID NO: 4029 - protein, 13 aa, synthetic construct
  REGION 1..13: note = short peptide
YLQQCPFEDHVKL

SEQ ID NO: 4030 - protein, 10 aa, synthetic construct
  REGION 1..10: note = short peptide
TVLGSSQIIL

SEQ ID NO: 4031 - protein, 11 aa, synthetic construct
  REGION 1..11: note = short peptide
LNGLPGPIGPP

SEQ ID NO: 4032 - protein, 11 aa, synthetic construct
  REGION 1..11: note = short peptide
KYPIEHGIVTN

SEQ ID NO: 4033 - protein, 8 aa, synthetic construct
  REGION 1..8: note = short peptide
KTNRTLSY

SEQ ID NO: 4034 - protein, 9 aa, synthetic construct
  REGION 1..9: note = short peptide
KVYENYPTY

SEQ ID NO: 4035 - protein, 9 aa, synthetic construct
  REGION 1..9: note = short peptide
VLDPYLLKY

SEQ ID NO: 4036 - protein, 14 aa, synthetic construct
  REGION 1..14: note = short peptide
KVQHIQLLQKNVRA

SEQ ID NO: 4037 - protein, 9 aa, synthetic construct
  REGION 1..9: note = short peptide
KVYENYSFE

SEQ ID NO: 4038 - protein, 9 aa, synthetic construct
  REGION 1..9: note = short peptide
KYMDINFDF

SEQ ID NO: 4039 - protein, 12 aa, synthetic construct
  REGION 1..12: note = short peptide
VLNTNIDGRRKI

SEQ ID NO: 4040 - protein, 10 aa, synthetic construct
  REGION 1..10: note = short peptide
TVPVPVPVPV

SEQ ID NO: 4041 - protein, 10 aa, synthetic construct
  REGION 1..10: note = short peptide
YPIEHGIVTN

SEQ ID NO: 4042 - protein, 9 aa, synthetic construct
  REGION 1..9: note = short peptide
KVLLLELKH

SEQ ID NO: 4043 - protein, 12 aa, synthetic construct
  REGION 1..12: note = short peptide
YLYDLNHTLYNV

SEQ ID NO: 4044 - protein, 9 aa, synthetic construct
  REGION 1..9: note = short peptide
VQRVPVSNV

SEQ ID NO: 4045 - protein, 10 aa, synthetic construct
  REGION 1..10: note = short peptide
LLNPVLLPPK

SEQ ID NO: 4046 - protein, 14 aa, synthetic construct
  REGION 1..14: note = short peptide
TYSLGSALRPSTSR

SEQ ID NO: 4047 - protein, 15 aa, synthetic construct
  REGION 1..15: note = short peptide
LAKRRSSKDLLGKPP

SEQ ID NO: 4048 - protein, 9 aa, synthetic construct
  REGION 1..9: note = short peptide
VQRNGSAAM

SEQ ID NO: 4049 - protein, 12 aa, synthetic construct
  REGION 1..12: note = short peptide
VQQNGSIYIHVY

SEQ ID NO: 4050 - protein, 10 aa, synthetic construct
  REGION 1..10: note = short peptide
VQLPRNTTSY

SEQ ID NO: 4051 - protein, 9 aa, synthetic construct
  REGION 1..9: note = short peptide
TVYPMERLV

SEQ ID NO: 4052 - protein, 11 aa, synthetic construct
  REGION 1..11: note = short peptide
TVVGENGSVLR

SEQ ID NO: 4053 - protein, 15 aa, synthetic construct
  REGION 1..15: note = short peptide
VPDLEKLEKVDQFKK

SEQ ID NO: 4054 - protein, 10 aa, synthetic construct
  REGION 1..10: note = short peptide
RLKNEGATVK

SEQ ID NO: 4055 - protein, 8 aa, synthetic construct
  REGION 1..8: note = short peptide
SGGGSDLT

SEQ ID NO: 4056 - protein, 11 aa, synthetic construct
  REGION 1..11: note = short peptide
PGKKVQTLPSW

SEQ ID NO: 4057 - protein, 9 aa, synthetic construct
  REGION 1..9: note = short peptide
SGGLLKALR

SEQ ID NO: 4058 - protein, 12 aa, synthetic construct
  REGION 1..12: note = short peptide
SGGSYRDSYDSY

SEQ ID NO: 4059 - protein, 14 aa, synthetic construct
  REGION 1..14: note = short peptide
SGKNQFNRGGGHRG

SEQ ID NO: 4060 - protein, 15 aa, synthetic construct
  REGION 1..15: note = short peptide
SGNFGGGRGGGFGGN

SEQ ID NO: 4061 - protein, 9 aa, synthetic construct
  REGION 1..9: note = short peptide
SGPQNASSL

SEQ ID NO: 4062 - protein, 11 aa, synthetic construct
  REGION 1..11: note = short peptide
PAPAQAPTLRQ

SEQ ID NO: 4063 - protein, 9 aa, synthetic construct
  REGION 1..9: note = short peptide
SDSARSKTL

SEQ ID NO: 4064 - protein, 11 aa, synthetic construct
  REGION 1..11: note = short peptide
PVPAGMTVPPP

SEQ ID NO: 4065 - protein, 8 aa, synthetic construct
  REGION 1..8: note = short peptide
SDDFLGTL

SEQ ID NO: 4066 - protein, 14 aa, synthetic construct
  REGION 1..14: note = short peptide
PTANQWDYKNIIEK

SEQ ID NO: 4067 - protein, 10 aa, synthetic construct
  REGION 1..10: note = short peptide
SAARGLAASL

SEQ ID NO: 4068 - protein, 8 aa, synthetic construct
  REGION 1..8: note = short peptide
SLREPLAK

SEQ ID NO: 4069 - protein, 9 aa, synthetic construct
  REGION 1..9: note = short peptide
SLGVAALYK

SEQ ID NO: 4070 - protein, 8 aa, synthetic construct
  REGION 1..8: note = short peptide
SLHEHNKI

SEQ ID NO: 4071 - protein, 8 aa, synthetic construct
  REGION 1..8: note = short peptide
SLIILIML

SEQ ID NO: 4072 - protein, 11 aa, synthetic construct
  REGION 1..11: note = short peptide
SLLNGSESAKL

SEQ ID NO: 4073 - protein, 9 aa, synthetic construct
  REGION 1..9: note = short peptide
NESLFGKKY

SEQ ID NO: 4074 - protein, 9 aa, synthetic construct
  REGION 1..9: note = short peptide
SLPVDSVVI

SEQ ID NO: 4075 - protein, 15 aa, synthetic construct
  REGION 1..15: note = short peptide
SLSKLGDVYVNDAFG

SEQ ID NO: 4076 - protein, 8 aa, synthetic construct
  REGION 1..8: note = short peptide
NHNVSLVL

SEQ ID NO: 4077 - protein, 13 aa, synthetic construct
  REGION 1..13: note = short peptide
SLVIPEKFQHILR

SEQ ID NO: 4078 - protein, 10 aa, synthetic construct
  REGION 1..10: note = short peptide
NAGSEHSGRY

SEQ ID NO: 4079 - protein, 11 aa, synthetic construct
  REGION 1..11: note = short peptide
SMLRLQKRLAS

SEQ ID NO: 4080 - protein, 15 aa, synthetic construct
  REGION 1..15: note = short peptide
MSRYELKLAIPEGKQ

SEQ ID NO: 4081 - protein, 9 aa, synthetic construct
  REGION 1..9: note = short peptide
SLGLDIDSR

SEQ ID NO: 4082 - protein, 13 aa, synthetic construct
  REGION 1..13: note = short peptide
SGSSSVAAMKKVV

SEQ ID NO: 4083 - protein, 14 aa, synthetic construct
  REGION 1..14: note = short peptide
SGSSSVAAMKKVVQ

SEQ ID NO: 4084 - protein, 9 aa, synthetic construct
  REGION 1..9: note = short peptide
NSPAVLRPI

SEQ ID NO: 4085 - protein, 10 aa, synthetic construct
  REGION 1..10: note = short peptide
SIRGIGPKRA

SEQ ID NO: 4086 - protein, 10 aa, synthetic construct
  REGION 1..10: note = short peptide
SADDGIRNLY

SEQ ID NO: 4087 - protein, 12 aa, synthetic construct
  REGION 1..12: note = short peptide
RGEPGPPGPAGA

SEQ ID NO: 4088 - protein, 9 aa, synthetic construct
  REGION 1..9: note = short peptide
RPKENVTIM

SEQ ID NO: 4089 - protein, 9 aa, synthetic construct
  REGION 1..9: note = short peptide
RPKTPPPAP

SEQ ID NO: 4090 - protein, 11 aa, synthetic construct
  REGION 1..11: note = short peptide
RPSHHSQRSSL

SEQ ID NO: 4091 - protein, 12 aa, synthetic construct
  REGION 1..12: note = short peptide
RRANLTSMLIQR

SEQ ID NO: 4092 - protein, 9 aa, synthetic construct
  REGION 1..9: note = short peptide
RGKSCLFRL

SEQ ID NO: 4093 - protein, 10 aa, synthetic construct
  REGION 1..10: note = short peptide
RPIGALARGA

SEQ ID NO: 4094 - protein, 10 aa, synthetic construct
  REGION 1..10: note = short peptide
RLWNFTMNAK

SEQ ID NO: 4095 - protein, 12 aa, synthetic construct
  REGION 1..12: note = short peptide
RLKYALTGDEVK

SEQ ID NO: 4096 - protein, 9 aa, synthetic construct
  REGION 1..9: note = short peptide
RLNFTLVGK

SEQ ID NO: 4097 - protein, 10 aa, synthetic construct
  REGION 1..10: note = short peptide
RLNPQYPMFR

SEQ ID NO: 4098 - protein, 8 aa, synthetic construct
  REGION 1..8: note = short peptide
RKTIVVNF

SEQ ID NO: 4099 - protein, 10 aa, synthetic construct
  REGION 1..10: note = short peptide
RIHTGDKLYK

SEQ ID NO: 4100 - protein, 9 aa, synthetic construct
  REGION 1..9: note = short peptide
RHHLDPHRI

SEQ ID NO: 4101 - protein, 8 aa, synthetic construct
  REGION 1..8: note = short peptide
REALVKKF

SEQ ID NO: 4102 - protein, 12 aa, synthetic construct
  REGION 1..12: note = short peptide
QIVDAQAVCTRC

SEQ ID NO: 4103 - protein, 10 aa, synthetic construct
  REGION 1..10: note = short peptide
RVFPEKGYSF

SEQ ID NO: 4104 - protein, 8 aa, synthetic construct
  REGION 1..8: note = short peptide
QPRAPAAL

SEQ ID NO: 4105 - protein, 9 aa, synthetic construct
  REGION 1..9: note = short peptide
RVPPDLFRR

SEQ ID NO: 4106 - protein, 8 aa, synthetic construct
  REGION 1..8: note = short peptide
QKGFTAAY

SEQ ID NO: 4107 - protein, 13 aa, synthetic construct
  REGION 1..13: note = short peptide
QISNGTSSVIVSR

SEQ ID NO: 4108 - protein, 9 aa, synthetic construct
  REGION 1..9: note = short peptide
QGVLASQAL

SEQ ID NO: 4109 - protein, 9 aa, synthetic construct
  REGION 1..9: note = short peptide
QGGLVCRAL

SEQ ID NO: 4110 - protein, 9 aa, synthetic construct
  REGION 1..9: note = short peptide
QGGLVCRAL

SEQ ID NO: 4111 - protein, 15 aa, synthetic construct
  REGION 1..15: note = short peptide
QQAADKYLYVDKNFI

SEQ ID NO: 4112 - protein, 11 aa, synthetic construct
  REGION 1..11: note = short peptide
RRYNQSEAGSH

SEQ ID NO: 4113 - protein, 9 aa, synthetic construct
  REGION 1..9: note = short peptide
QYPSNALVF

SEQ ID NO: 4114 - protein, 9 aa, synthetic construct
  REGION 1..9: note = short peptide
RDTSMVHEL

SEQ ID NO: 4115 - protein, 10 aa, synthetic construct
  REGION 1..10: note = short peptide
RCHDKLLRKT

SEQ ID NO: 4116 - protein, 10 aa, synthetic construct
  REGION 1..10: note = short peptide
QQRNQTNTFF

SEQ ID NO: 4117 - protein, 10 aa, synthetic construct
  REGION 1..10: note = short peptide
RTAEILAGKL

SEQ ID NO: 4118 - protein, 10 aa, synthetic construct
  REGION 1..10: note = short peptide
RTFANGSLAF

SEQ ID NO: 4119 - protein, 9 aa, synthetic construct
  REGION 1..9: note = short peptide
TKSVAVNPK

SEQ ID NO: 4120 - protein, 9 aa, synthetic construct
  REGION 1..9: note = short peptide
MEVLRPQLI

SEQ ID NO: 4121 - protein, 10 aa, synthetic construct
  REGION 1..10: note = short peptide
TKPPSLQWAW

SEQ ID NO: 4122 - protein, 12 aa, synthetic construct
  REGION 1..12: note = short peptide
MDPRKVNELRAF

SEQ ID NO: 4123 - protein, 9 aa, synthetic construct
  REGION 1..9: note = short peptide
MDIAIHHPW

SEQ ID NO: 4124 - protein, 9 aa, synthetic construct
  REGION 1..9: note = short peptide
TLCGLLQML

SEQ ID NO: 4125 - protein, 11 aa, synthetic construct
  REGION 1..11: note = short peptide
TLDGTKHITTI

SEQ ID NO: 4126 - protein, 13 aa, synthetic construct
  REGION 1..13: note = short peptide
TLGSGVTGAAKVA

SEQ ID NO: 4127 - protein, 11 aa, synthetic construct
  REGION 1..11: note = short peptide
TLLNASRSLEV

SEQ ID NO: 4128 - protein, 12 aa, synthetic construct
  REGION 1..12: note = short peptide
TLPEGLLPDPAL

SEQ ID NO: 4129 - protein, 11 aa, synthetic construct
  REGION 1..11: note = short peptide
TGDIFTTETSI

SEQ ID NO: 4130 - protein, 9 aa, synthetic construct
  REGION 1..9: note = short peptide
TELPAPLSY

SEQ ID NO: 4131 - protein, 9 aa, synthetic construct
  REGION 1..9: note = short peptide
TGKSLLHLH

SEQ ID NO: 4132 - protein, 10 aa, synthetic construct
  REGION 1..10: note = short peptide
MMDPNSTQRY

SEQ ID NO: 4133 - protein, 9 aa, synthetic construct
  REGION 1..9: note = short peptide
TGYLKGYTL

SEQ ID NO: 4134 - protein, 9 aa, synthetic construct
  REGION 1..9: note = short peptide
THCPSNNVI

SEQ ID NO: 4135 - protein, 11 aa, synthetic construct
  REGION 1..11: note = short peptide
TLRNYTVINSK

SEQ ID NO: 4136 - protein, 8 aa, synthetic construct
  REGION 1..8: note = short peptide
SNSTRLSF

SEQ ID NO: 4137 - protein, 11 aa, synthetic construct
  REGION 1..11: note = short peptide
LSFETTDDSLR

SEQ ID NO: 4138 - protein, 12 aa, synthetic construct
  REGION 1..12: note = short peptide
LSPGPSTPPGAP

SEQ ID NO: 4139 - protein, 10 aa, synthetic construct
  REGION 1..10: note = short peptide
TPQGRGTVAA

SEQ ID NO: 4140 - protein, 9 aa, synthetic construct
  REGION 1..9: note = short peptide
TPRSPPLGL

SEQ ID NO: 4141 - protein, 11 aa, synthetic construct
  REGION 1..11: note = short peptide
TPVNGSIVIVR

SEQ ID NO: 4142 - protein, 11 aa, synthetic construct
  REGION 1..11: note = short peptide
LSAAKSKPIIA

SEQ ID NO: 4143 - protein, 11 aa, synthetic construct
  REGION 1..11: note = short peptide
TPDAMKAAMAL

SEQ ID NO: 4144 - protein, 15 aa, synthetic construct
  REGION 1..15: note = short peptide
LRVAKVTGGAASKLS

SEQ ID NO: 4145 - protein, 11 aa, synthetic construct
  REGION 1..11: note = short peptide
LQGLWPVPRGA

SEQ ID NO: 4146 - protein, 9 aa, synthetic construct
  REGION 1..9: note = short peptide
LPWQGLKAA

SEQ ID NO: 4147 - protein, 10 aa, synthetic construct
  REGION 1..10: note = short peptide
TPIEGKNMSF

SEQ ID NO: 4148 - protein, 10 aa, synthetic construct
  REGION 1..10: note = short peptide
LTDITKGVQY

SEQ ID NO: 4149 - protein, 9 aa, synthetic construct
  REGION 1..9: note = short peptide
TLSRPLSPL

SEQ ID NO: 4150 - protein, 8 aa, synthetic construct
  REGION 1..8: note = short peptide
TMCNLLAY

SEQ ID NO: 4151 - protein, 10 aa, synthetic construct
  REGION 1..10: note = short peptide
TMDKSELVQK

SEQ ID NO: 4152 - protein, 9 aa, synthetic construct
  REGION 1..9: note = short peptide
LVNNKISKI

SEQ ID NO: 4153 - protein, 11 aa, synthetic construct
  REGION 1..11: note = short peptide
TNAASVSRSGA

SEQ ID NO: 4154 - protein, 9 aa, synthetic construct
  REGION 1..9: note = short peptide
LTDPEAAKY

SEQ ID NO: 4155 - protein, 9 aa, synthetic construct
  REGION 1..9: note = short peptide
LTNNQTLRL

SEQ ID NO: 4156 - protein, 9 aa, synthetic construct
  REGION 1..9: note = short peptide
LTGRNLFFK

SEQ ID NO: 4157 - protein, 13 aa, synthetic construct
  REGION 1..13: note = short peptide
LTELCKQKPADPL

SEQ ID NO: 4158 - protein, 14 aa, synthetic construct
  REGION 1..14: note = short peptide
TPATGTTQGKKAEG

SEQ ID NO: 4159 - protein, 8 aa, synthetic construct
  REGION 1..8: note = short peptide
SRQKKLEM

SEQ ID NO: 4160 - protein, 15 aa, synthetic construct
  REGION 1..15: note = short peptide
SQVMREWEEAERQAK

SEQ ID NO: 4161 - protein, 11 aa, synthetic construct
  REGION 1..11: note = short peptide
SRAGPLSGKKF

SEQ ID NO: 4162 - protein, 10 aa, synthetic construct
  REGION 1..10: note = short peptide
SRFSGVPDRF

SEQ ID NO: 4163 - protein, 8 aa, synthetic construct
  REGION 1..8: note = short peptide
SRNSSRVL

SEQ ID NO: 4164 - protein, 11 aa, synthetic construct
  REGION 1..11: note = short peptide
SRSGRGGNFGF

SEQ ID NO: 4165 - protein, 10 aa, synthetic construct
  REGION 1..10: note = short peptide
SSAHFNRGPA

SEQ ID NO: 4166 - protein, 9 aa, synthetic construct
  REGION 1..9: note = short peptide
MPVDSFNSM

SEQ ID NO: 4167 - protein, 11 aa, synthetic construct
  REGION 1..11: note = short peptide
MPVDRILEAEL

SEQ ID NO: 4168 - protein, 8 aa, synthetic construct
  REGION 1..8: note = short peptide
SSLKSNVL

SEQ ID NO: 4169 - protein, 9 aa, synthetic construct
  REGION 1..9: note = short peptide
MPSPVSPKL

SEQ ID NO: 4170 - protein, 9 aa, synthetic construct
  REGION 1..9: note = short peptide
SQKPVMVKR

SEQ ID NO: 4171 - protein, 11 aa, synthetic construct
  REGION 1..11: note = short peptide
TDRYTIHSQLE

SEQ ID NO: 4172 - protein, 9 aa, synthetic construct
  REGION 1..9: note = short peptide
MPVPEILQL

SEQ ID NO: 4173 - protein, 10 aa, synthetic construct
  REGION 1..10: note = short peptide
SPISNGSPEL

SEQ ID NO: 4174 - protein, 9 aa, synthetic construct
  REGION 1..9: note = short peptide
SPRDVSKKA

SEQ ID NO: 4175 - protein, 11 aa, synthetic construct
  REGION 1..11: note = short peptide
MPVPGHDVEAY

SEQ ID NO: 4176 - protein, 9 aa, synthetic construct
  REGION 1..9: note = short peptide
MPVNTNQNF

SEQ ID NO: 4177 - protein, 9 aa, synthetic construct
  REGION 1..9: note = short peptide
MPVKQPYYL

SEQ ID NO: 4178 - protein, 9 aa, synthetic construct
  REGION 1..9: note = short peptide
MPVIPQPEI

SEQ ID NO: 4179 - protein, 8 aa, synthetic construct
  REGION 1..8: note = short peptide
SPVELRGA

SEQ ID NO: 4180 - protein, 8 aa, synthetic construct
  REGION 1..8: note = short peptide
SSNLTNAI

SEQ ID NO: 4181 - protein, 9 aa, synthetic construct
  REGION 1..9: note = short peptide
SVVDLINHY

SEQ ID NO: 4182 - protein, 11 aa, synthetic construct
  REGION 1..11: note = short peptide
MPFSPYEPLNF

SEQ ID NO: 4183 - protein, 12 aa, synthetic construct
  REGION 1..12: note = short peptide
TAADTAAQISKR

SEQ ID NO: 4184 - protein, 15 aa, synthetic construct
  REGION 1..15: note = short peptide
TAAPAVAETPDIKLF

SEQ ID NO: 4185 - protein, 15 aa, synthetic construct
  REGION 1..15: note = short peptide
TAFQYIIDNKGIDSD

SEQ ID NO: 4186 - protein, 10 aa, synthetic construct
  REGION 1..10: note = short peptide
TASAPGRAGP

SEQ ID NO: 4187 - protein, 14 aa, synthetic construct
  REGION 1..14: note = short peptide
TASTGKTFPGFFSP

SEQ ID NO: 4188 - protein, 9 aa, synthetic construct
  REGION 1..9: note = short peptide
MPFESAVVI

SEQ ID NO: 4189 - protein, 10 aa, synthetic construct
  REGION 1..10: note = short peptide
MPEQIVVQAL

SEQ ID NO: 4190 - protein, 10 aa, synthetic construct
  REGION 1..10: note = short peptide
TCIEAGALDY

SEQ ID NO: 4191 - protein, 9 aa, synthetic construct
  REGION 1..9: note = short peptide
TDEPMGITL

SEQ ID NO: 4192 - protein, 9 aa, synthetic construct
  REGION 1..9: note = short peptide
MPHNQFIKM

SEQ ID NO: 4193 - protein, 11 aa, synthetic construct
  REGION 1..11: note = short peptide
MPHSIMRVDIA

SEQ ID NO: 4194 - protein, 9 aa, synthetic construct
  REGION 1..9: note = short peptide
MPHVPITTL

SEQ ID NO: 4195 - protein, 9 aa, synthetic construct
  REGION 1..9: note = short peptide
MPRPPMASV

SEQ ID NO: 4196 - protein, 10 aa, synthetic construct
  REGION 1..10: note = short peptide
MPQLNAIIAA

SEQ ID NO: 4197 - protein, 9 aa, synthetic construct
  REGION 1..9: note = short peptide
SSVSPGASK

SEQ ID NO: 4198 - protein, 10 aa, synthetic construct
  REGION 1..10: note = short peptide
RLKHMVDDKI

SEQ ID NO: 4199 - protein, 10 aa, synthetic construct
  REGION 1..10: note = short peptide
STTTGHLIYK

SEQ ID NO: 4200 - protein, 9 aa, synthetic construct
  REGION 1..9: note = short peptide
MPKVKTIEL

SEQ ID NO: 4201 - protein, 11 aa, synthetic construct
  REGION 1..11: note = short peptide
MPITEVFKEEM

SEQ ID NO: 4202 - protein, 11 aa, synthetic construct
  REGION 1..11: note = short peptide
MPINASNALTL

SEQ ID NO: 4203 - protein, 9 aa, synthetic construct
  REGION 1..9: note = short peptide
YYTKGFALL

SEQ ID NO: 4204 - protein, 9 aa, synthetic construct
  REGION 1..9: note = short peptide
HIRHKIVEM

SEQ ID NO: 4205 - protein, 10 aa, synthetic construct
  REGION 1..10: note = short peptide
HHCEHLLERL

SEQ ID NO: 4206 - protein, 9 aa, synthetic construct
  REGION 1..9: note = short peptide
HGTDLYRGE

SEQ ID NO: 4207 - protein, 12 aa, synthetic construct
  REGION 1..12: note = short peptide
HGFREGTTPKPK

SEQ ID NO: 4208 - protein, 8 aa, synthetic construct
  REGION 1..8: note = short peptide
HFSRPVGP

SEQ ID NO: 4209 - protein, 10 aa, synthetic construct
  REGION 1..10: note = short peptide
HEIPLRNGTL

SEQ ID NO: 4210 - protein, 11 aa, synthetic construct
  REGION 1..11: note = short peptide
HASPILPITEF

SEQ ID NO: 4211 - protein, 9 aa, synthetic construct
  REGION 1..9: note = short peptide
GTVRIGVAK

SEQ ID NO: 4212 - protein, 9 aa, synthetic construct
  REGION 1..9: note = short peptide
GTGASGSFK

SEQ ID NO: 4213 - protein, 10 aa, synthetic construct
  REGION 1..10: note = short peptide
GSYNKVFLAK

SEQ ID NO: 4214 - protein, 13 aa, synthetic construct
  REGION 1..13: note = short peptide
HHPGIAEFPSRGK

SEQ ID NO: 4215 - protein, 13 aa, synthetic construct
  REGION 1..13: note = short peptide
GSAGLSRLHGLFA

SEQ ID NO: 4216 - protein, 9 aa, synthetic construct
  REGION 1..9: note = short peptide
HRNLLIVFK

SEQ ID NO: 4217 - protein, 15 aa, synthetic construct
  REGION 1..15: note = short peptide
HQPHKVTQYKKGKDS

SEQ ID NO: 4218 - protein, 9 aa, synthetic construct
  REGION 1..9: note = short peptide
HPPSHWPLI

SEQ ID NO: 4219 - protein, 8 aa, synthetic construct
  REGION 1..8: note = short peptide
HPGRVPLI

SEQ ID NO: 4220 - protein, 12 aa, synthetic construct
  REGION 1..12: note = short peptide
HPGIIPMIGLIC

SEQ ID NO: 4221 - protein, 11 aa, synthetic construct
  REGION 1..11: note = short peptide
HPGIAEFPSRG

SEQ ID NO: 4222 - protein, 9 aa, synthetic construct
  REGION 1..9: note = short peptide
HNVQGFHPY

SEQ ID NO: 4223 - protein, 11 aa, synthetic construct
  REGION 1..11: note = short peptide
HLQGEVFGAVL

SEQ ID NO: 4224 - protein, 9 aa, synthetic construct
  REGION 1..9: note = short peptide
HLPNGSHVI

SEQ ID NO: 4225 - protein, 12 aa, synthetic construct
  REGION 1..12: note = short peptide
GSAGLSRLHGLF

SEQ ID NO: 4226 - protein, 8 aa, synthetic construct
  REGION 1..8: note = short peptide
GGGRPHPR

SEQ ID NO: 4227 - protein, 11 aa, synthetic construct
  REGION 1..11: note = short peptide
GFSIRPVAGYL

SEQ ID NO: 4228 - protein, 9 aa, synthetic construct
  REGION 1..9: note = short peptide
GEAERFMTP

SEQ ID NO: 4229 - protein, 8 aa, synthetic construct
  REGION 1..8: note = short peptide
GAGALAFE

SEQ ID NO: 4230 - protein, 9 aa, synthetic construct
  REGION 1..9: note = short peptide
FVTEVAYKM

SEQ ID NO: 4231 - protein, 15 aa, synthetic construct
  REGION 1..15: note = short peptide
FVKVVKNKAYFKRYQ

SEQ ID NO: 4232 - protein, 10 aa, synthetic construct
  REGION 1..10: note = short peptide
GRAPISNPGM

SEQ ID NO: 4233 - protein, 8 aa, synthetic construct
  REGION 1..8: note = short peptide
GLGRGAMG

SEQ ID NO: 4234 - protein, 10 aa, synthetic construct
  REGION 1..10: note = short peptide
GQPLRPQANY

SEQ ID NO: 4235 - protein, 9 aa, synthetic construct
  REGION 1..9: note = short peptide
GQIGVRTPL

SEQ ID NO: 4236 - protein, 9 aa, synthetic construct
  REGION 1..9: note = short peptide
GPVSQGKAA

SEQ ID NO: 4237 - protein, 11 aa, synthetic construct
  REGION 1..11: note = short peptide
GPRGWLVLCVL

SEQ ID NO: 4238 - protein, 8 aa, synthetic construct
  REGION 1..8: note = short peptide
GPGGPRNL

SEQ ID NO: 4239 - protein, 9 aa, synthetic construct
  REGION 1..9: note = short peptide
GMGKPAITK

SEQ ID NO: 4240 - protein, 10 aa, synthetic construct
  REGION 1..10: note = short peptide
HVYDGKFLAR

SEQ ID NO: 4241 - protein, 9 aa, synthetic construct
  REGION 1..9: note = short peptide
KKSKTLFSL

SEQ ID NO: 4242 - protein, 10 aa, synthetic construct
  REGION 1..10: note = short peptide
KKKEADAIKL

SEQ ID NO: 4243 - protein, 9 aa, synthetic construct
  REGION 1..9: note = short peptide
KKHKGKKMT

SEQ ID NO: 4244 - protein, 8 aa, synthetic construct
  REGION 1..8: note = short peptide
KKFLAILK

SEQ ID NO: 4245 - protein, 9 aa, synthetic construct
  REGION 1..9: note = short peptide
KKERGVSNK

SEQ ID NO: 4246 - protein, 11 aa, synthetic construct
  REGION 1..11: note = short peptide
KKAKAPGLSSK

SEQ ID NO: 4247 - protein, 10 aa, synthetic construct
  REGION 1..10: note = short peptide
KISSKNVQIK

SEQ ID NO: 4248 - protein, 10 aa, synthetic construct
  REGION 1..10: note = short peptide
KIMDATNILV

SEQ ID NO: 4249 - protein, 12 aa, synthetic construct
  REGION 1..12: note = short peptide
KILNGSNKKSQK

SEQ ID NO: 4250 - protein, 9 aa, synthetic construct
  REGION 1..9: note = short peptide
KIKQSVGNK

SEQ ID NO: 4251 - protein, 9 aa, synthetic construct
  REGION 1..9: note = short peptide
KIADRFLLY

SEQ ID NO: 4252 - protein, 10 aa, synthetic construct
  REGION 1..10: note = short peptide
KHSMVIKSAA

SEQ ID NO: 4253 - protein, 10 aa, synthetic construct
  REGION 1..10: note = short peptide
KKWCMAGKCI

SEQ ID NO: 4254 - protein, 9 aa, synthetic construct
  REGION 1..9: note = short peptide
KLDNEIKAL

SEQ ID NO: 4255 - protein, 15 aa, synthetic construct
  REGION 1..15: note = short peptide
KLEKAKAKELATKLG

SEQ ID NO: 4256 - protein, 13 aa, synthetic construct
  REGION 1..13: note = short peptide
KNIEVTMYVLYAD

SEQ ID NO: 4257 - protein, 10 aa, synthetic construct
  REGION 1..10: note = short peptide
KMVDQLFCKK

SEQ ID NO: 4258 - protein, 10 aa, synthetic construct
  REGION 1..10: note = short peptide
KMPTTPVKAK

SEQ ID NO: 4259 - protein, 9 aa, synthetic construct
  REGION 1..9: note = short peptide
KMNDTIFGF

SEQ ID NO: 4260 - protein, 9 aa, synthetic construct
  REGION 1..9: note = short peptide
KMNDTIFGF

SEQ ID NO: 4261 - protein, 9 aa, synthetic construct
  REGION 1..9: note = short peptide
KMNDTIFGF

SEQ ID NO: 4262 - protein, 15 aa, synthetic construct
  REGION 1..15: note = short peptide
KLSHGSVVIAAVISC

SEQ ID NO: 4263 - protein, 10 aa, synthetic construct
  REGION 1..10: note = short peptide
KLKKTETQEK

SEQ ID NO: 4264 - protein, 8 aa, synthetic construct
  REGION 1..8: note = short peptide
KGYVQDLL

SEQ ID NO: 4265 - protein, 15 aa, synthetic construct
  REGION 1..15: note = short peptide
KGQKYFDSGDYNMAK

SEQ ID NO: 4266 - protein, 12 aa, synthetic construct
  REGION 1..12: note = short peptide
KGPQQQKASMTK

SEQ ID NO: 4267 - protein, 11 aa, synthetic construct
  REGION 1..11: note = short peptide
IVQQVPAPSRM

SEQ ID NO: 4268 - protein, 10 aa, synthetic construct
  REGION 1..10: note = short peptide
ITDSAGHILY

SEQ ID NO: 4269 - protein, 11 aa, synthetic construct
  REGION 1..11: note = short peptide
ISMPDVDLNLK

SEQ ID NO: 4270 - protein, 15 aa, synthetic construct
  REGION 1..15: note = short peptide
IQIINKDDSNWWQGR

SEQ ID NO: 4271 - protein, 11 aa, synthetic construct
  REGION 1..11: note = short peptide
IPKDYKTMAAL

SEQ ID NO: 4272 - protein, 9 aa, synthetic construct
  REGION 1..9: note = short peptide
ILRFPYDSW

SEQ ID NO: 4273 - protein, 9 aa, synthetic construct
  REGION 1..9: note = short peptide
IINSSITTK

SEQ ID NO: 4274 - protein, 8 aa, synthetic construct
  REGION 1..8: note = short peptide
IHPPRVKL

SEQ ID NO: 4275 - protein, 13 aa, synthetic construct
  REGION 1..13: note = short peptide
IGGTNQTGKGLEY

SEQ ID NO: 4276 - protein, 11 aa, synthetic construct
  REGION 1..11: note = short peptide
KAEVDRKLAEK

SEQ ID NO: 4277 - protein, 8 aa, synthetic construct
  REGION 1..8: note = short peptide
KDGKHPVL

SEQ ID NO: 4278 - protein, 9 aa, synthetic construct
  REGION 1..9: note = short peptide
KFIDTTSKF

SEQ ID NO: 4279 - protein, 9 aa, synthetic construct
  REGION 1..9: note = short peptide
KGIGHFKRA

SEQ ID NO: 4280 - protein, 12 aa, synthetic construct
  REGION 1..12: note = short peptide
KGEPGVPGPPGR

SEQ ID NO: 4281 - protein, 8 aa, synthetic construct
  REGION 1..8: note = short peptide
KFFNYINL

SEQ ID NO: 4282 - protein, 10 aa, synthetic construct
  REGION 1..10: note = short peptide
KDNGAIEFTF

SEQ ID NO: 4283 - protein, 15 aa, synthetic construct
  REGION 1..15: note = short peptide
KEYEKTKSQREMEEK

SEQ ID NO: 4284 - protein, 8 aa, synthetic construct
  REGION 1..8: note = short peptide
KEKEFSKK

SEQ ID NO: 4285 - protein, 10 aa, synthetic construct
  REGION 1..10: note = short peptide
KEEGWLAEHM

SEQ ID NO: 4286 - protein, 8 aa, synthetic construct
  REGION 1..8: note = short peptide
KDSLHEKF

SEQ ID NO: 4287 - protein, 9 aa, synthetic construct
  REGION 1..9: note = short peptide
KNRELLARL

SEQ ID NO: 4288 - protein, 11 aa, synthetic construct
  REGION 1..11: note = short peptide
APRGNVTSLSL

SEQ ID NO: 4289 - protein, 10 aa, synthetic construct
  REGION 1..10: note = short peptide
APKSVNGSVA

SEQ ID NO: 4290 - protein, 9 aa, synthetic construct
  REGION 1..9: note = short peptide
APFRPLGSL

SEQ ID NO: 4291 - protein, 9 aa, synthetic construct
  REGION 1..9: note = short peptide
ANNTHQHVF

SEQ ID NO: 4292 - protein, 8 aa, synthetic construct
  REGION 1..8: note = short peptide
AMVSEFLK

SEQ ID NO: 4293 - protein, 11 aa, synthetic construct
  REGION 1..11: note = short peptide
ALRPSTSRSLY

SEQ ID NO: 4294 - protein, 10 aa, synthetic construct
  REGION 1..10: note = short peptide
APRWGNPRAL

SEQ ID NO: 4295 - protein, 10 aa, synthetic construct
  REGION 1..10: note = short peptide
AVNKGLTLLD

SEQ ID NO: 4296 - protein, 9 aa, synthetic construct
  REGION 1..9: note = short peptide
ATYGKPVHH

SEQ ID NO: 4297 - protein, 11 aa, synthetic construct
  REGION 1..11: note = short peptide
ATLKEKLIAPV

SEQ ID NO: 4298 - protein, 10 aa, synthetic construct
  REGION 1..10: note = short peptide
ASLYQRFTGK

SEQ ID NO: 4299 - protein, 8 aa, synthetic construct
  REGION 1..8: note = short peptide
ASDDATIK

SEQ ID NO: 4300 - protein, 8 aa, synthetic construct
  REGION 1..8: note = short peptide
AQALERTL

SEQ ID NO: 4301 - protein, 9 aa, synthetic construct
  REGION 1..9: note = short peptide
APVNVGRGS

SEQ ID NO: 4302 - protein, 9 aa, synthetic construct
  REGION 1..9: note = short peptide
ALPFRKDLE

SEQ ID NO: 4303 - protein, 10 aa, synthetic construct
  REGION 1..10: note = short peptide
ALLPWPFRNK

SEQ ID NO: 4304 - protein, 13 aa, synthetic construct
  REGION 1..13: note = short peptide
FTDGITNKLVACY

SEQ ID NO: 4305 - protein, 13 aa, synthetic construct
  REGION 1..13: note = short peptide
ADGGGPKDAPSLR

SEQ ID NO: 4306 - protein, 9 aa, synthetic construct
  REGION 1..9: note = short peptide
AAVQAAEVK

SEQ ID NO: 4307 - protein, 13 aa, synthetic construct
  REGION 1..13: note = short peptide
AASSRAQVLSLYR

SEQ ID NO: 4308 - protein, 12 aa, synthetic construct
  REGION 1..12: note = short peptide
AAQSAPKVVLKS

SEQ ID NO: 4309 - protein, 12 aa, synthetic construct
  REGION 1..12: note = short peptide
AAKVFESIGKFG

SEQ ID NO: 4310 - protein, 11 aa, synthetic construct
  REGION 1..11: note = short peptide
AAGGLQTSLHS

SEQ ID NO: 4311 - protein, 9 aa, synthetic construct
  REGION 1..9: note = short peptide
AAFTIQQNL

SEQ ID NO: 4312 - protein, 11 aa, synthetic construct
  REGION 1..11: note = short peptide
AAASPIVSGAR

SEQ ID NO: 4313 - protein, 9 aa, synthetic construct
  REGION 1..9: note = short peptide
AAAPARSCA

SEQ ID NO: 4314 - protein, 9 aa, synthetic construct
  REGION 1..9: note = short peptide
AISSPQRSK

SEQ ID NO: 4315 - protein, 13 aa, synthetic construct
  REGION 1..13: note = short peptide
AEVEQKKKRTFRK

SEQ ID NO: 4316 - protein, 9 aa, synthetic construct
  REGION 1..9: note = short peptide
AESSDKLYR

SEQ ID NO: 4317 - protein, 11 aa, synthetic construct
  REGION 1..11: note = short peptide
AEMGKGSFKYA

SEQ ID NO: 4318 - protein, 11 aa, synthetic construct
  REGION 1..11: note = short peptide
AEMGKGSFKYA

SEQ ID NO: 4319 - protein, 9 aa, synthetic construct
  REGION 1..9: note = short peptide
AEAPVILSV

SEQ ID NO: 4320 - protein, 14 aa, synthetic construct
  REGION 1..14: note = short peptide
ADQLTEEQIAEFKE

SEQ ID NO: 4321 - protein, 9 aa, synthetic construct
  REGION 1..9: note = short peptide
ADLRDVDGL

SEQ ID NO: 4322 - protein, 10 aa, synthetic construct
  REGION 1..10: note = short peptide
AVNPRDPPSW

SEQ ID NO: 4323 - protein, 10 aa, synthetic construct
  REGION 1..10: note = short peptide
CCGIRNSSVY

SEQ ID NO: 4324 - protein, 11 aa, synthetic construct
  REGION 1..11: note = short peptide
FAYDGKDYLTL

SEQ ID NO: 4325 - protein, 11 aa, synthetic construct
  REGION 1..11: note = short peptide
EYVNDFDLMKF

SEQ ID NO: 4326 - protein, 12 aa, synthetic construct
  REGION 1..12: note = short peptide
EVYQILEKGAAK

SEQ ID NO: 4327 - protein, 11 aa, synthetic construct
  REGION 1..11: note = short peptide
EVVGPEGMEKF

SEQ ID NO: 4328 - protein, 8 aa, synthetic construct
  REGION 1..8: note = short peptide
EVLRQIPP

SEQ ID NO: 4329 - protein, 11 aa, synthetic construct
  REGION 1..11: note = short peptide
EVIGHYPGSSF

SEQ ID NO: 4330 - protein, 10 aa, synthetic construct
  REGION 1..10: note = short peptide
EVIDLMIKEY

SEQ ID NO: 4331 - protein, 9 aa, synthetic construct
  REGION 1..9: note = short peptide
EVFYFEVTR

SEQ ID NO: 4332 - protein, 10 aa, synthetic construct
  REGION 1..10: note = short peptide
ETIPLTAEKL

SEQ ID NO: 4333 - protein, 12 aa, synthetic construct
  REGION 1..12: note = short peptide
ETHLDKHNIYSI

SEQ ID NO: 4334 - protein, 11 aa, synthetic construct
  REGION 1..11: note = short peptide
ESIGNCPFSQR

SEQ ID NO: 4335 - protein, 11 aa, synthetic construct
  REGION 1..11: note = short peptide
ESAPEGQAQQR

SEQ ID NO: 4336 - protein, 8 aa, synthetic construct
  REGION 1..8: note = short peptide
ERNPPTFF

SEQ ID NO: 4337 - protein, 11 aa, synthetic construct
  REGION 1..11: note = short peptide
EISSSPTSKNR

SEQ ID NO: 4338 - protein, 14 aa, synthetic construct
  REGION 1..14: note = short peptide
FANAGMNQFKPIFL

SEQ ID NO: 4339 - protein, 8 aa, synthetic construct
  REGION 1..8: note = short peptide
CGGGGRVY

SEQ ID NO: 4340 - protein, 10 aa, synthetic construct
  REGION 1..10: note = short peptide
FSETGGGEKY

SEQ ID NO: 4341 - protein, 9 aa, synthetic construct
  REGION 1..9: note = short peptide
FPQVNVTKM

SEQ ID NO: 4342 - protein, 9 aa, synthetic construct
  REGION 1..9: note = short peptide
FPHASNITL

SEQ ID NO: 4343 - protein, 8 aa, synthetic construct
  REGION 1..8: note = short peptide
FLNHGLSL

SEQ ID NO: 4344 - protein, 9 aa, synthetic construct
  REGION 1..9: note = short peptide
FLIDKVNAF

SEQ ID NO: 4345 - protein, 9 aa, synthetic construct
  REGION 1..9: note = short peptide
FKYRSNFTK

SEQ ID NO: 4346 - protein, 9 aa, synthetic construct
  REGION 1..9: note = short peptide
FHSHDGPSL

SEQ ID NO: 4347 - protein, 9 aa, synthetic construct
  REGION 1..9: note = short peptide
FHDKIEPML

SEQ ID NO: 4348 - protein, 10 aa, synthetic construct
  REGION 1..10: note = short peptide
EHANLTEVTF

SEQ ID NO: 4349 - protein, 10 aa, synthetic construct
  REGION 1..10: note = short peptide
EETETVTKSY

SEQ ID NO: 4350 - protein, 12 aa, synthetic construct
  REGION 1..12: note = short peptide
DKVDVASVIVTK

SEQ ID NO: 4351 - protein, 12 aa, synthetic construct
  REGION 1..12: note = short peptide
DHEDTNGSKESF

SEQ ID NO: 4352 - protein, 10 aa, synthetic construct
  REGION 1..10: note = short peptide
DGRVVLVGGR

SEQ ID NO: 4353 - protein, 15 aa, synthetic construct
  REGION 1..15: note = short peptide
DDVPHIALDGKLGGL

SEQ ID NO: 4354 - protein, 15 aa, synthetic construct
  REGION 1..15: note = short peptide
DDGKIVIFQSKPEIQ

SEQ ID NO: 4355 - protein, 10 aa, synthetic construct
  REGION 1..10: note = short peptide
CPPETKHQAL

SEQ ID NO: 4356 - protein, 10 aa, synthetic construct
  REGION 1..10: note = short peptide
CLDPAQRSLY

SEQ ID NO: 4357 - protein, 10 aa, synthetic construct
  REGION 1..10: note = short peptide
CLDPAQRSLY

SEQ ID NO: 4358 - protein, 15 aa, synthetic construct
  REGION 1..15: note = short peptide
DRTFQKWAAVVVPSG

SEQ ID NO: 4359 - protein, 9 aa, synthetic construct
  REGION 1..9: note = short peptide
DSDGSFFLY

SEQ ID NO: 4360 - protein, 9 aa, synthetic construct
  REGION 1..9: note = short peptide
EAGSHIIQR

SEQ ID NO: 4361 - protein, 11 aa, synthetic construct
  REGION 1..11: note = short peptide
EEEIAALVIDN

SEQ ID NO: 4362 - protein, 11 aa, synthetic construct
  REGION 1..11: note = short peptide
EAVKPTVGMKR

SEQ ID NO: 4363 - protein, 13 aa, synthetic construct
  REGION 1..13: note = short peptide
EANGANGSKAVAR

SEQ ID NO: 4364 - protein, 11 aa, synthetic construct
  REGION 1..11: note = short peptide
EAIPDEVIKKW

SEQ ID NO: 4365 - protein, 11 aa, synthetic construct
  REGION 1..11: note = short peptide
EAINATGSAHF

SEQ ID NO: 4366 - protein, 9 aa, synthetic construct
  REGION 1..9: note = short peptide
EAIGIISKM

SEQ ID NO: 4367 - protein, 13 aa, synthetic construct
  REGION 1..13: note = short peptide
DSFLGKLGGTLAR

SEQ ID NO: 4368 - protein, 11 aa, synthetic construct
  REGION 1..11: note = short peptide
DVHPNVSIGVF

SEQ ID NO: 4369 - protein, 15 aa, synthetic construct
  REGION 1..15: note = short peptide
DVGEFRAVTELGRPA

SEQ ID NO: 4370 - protein, 15 aa, synthetic construct
  REGION 1..15: note = short peptide
DTHPGSPGSPGPALR

SEQ ID NO: 4371 - protein, 15 aa, synthetic construct
  REGION 1..15: note = short peptide
GPPGITGFPGFIGSR

SEQ ID NO: 4372 - protein, 8 aa, synthetic construct
  REGION 1..8: note = short peptide
KNSQKASK

SEQ ID NO: 4373 - protein, 10 aa, synthetic construct
  REGION 1..10: note = short peptide
KSKSPERSKY

SEQ ID NO: 4374 - protein, 11 aa, synthetic construct
  REGION 1..11: note = short peptide
KSAPATGGVKK

SEQ ID NO: 4375 - protein, 9 aa, synthetic construct
  REGION 1..9: note = short peptide
KSKYFAVGK

SEQ ID NO: 4376 - protein, 15 aa, synthetic construct
  REGION 1..15: note = short peptide
KPGPPGPPGIPFNER

SEQ ID NO: 4377 - protein, 10 aa, synthetic construct
  REGION 1..10: note = short peptide
KPAEVKKMTA

SEQ ID NO: 4378 - protein, 9 aa, synthetic construct
  REGION 1..9: note = short peptide
KQKPMNVGL

SEQ ID NO: 4379 - protein, 9 aa, synthetic construct
  REGION 1..9: note = short peptide
KRQDVLYEL

SEQ ID NO: 4380 - protein, 8 aa, synthetic construct
  REGION 1..8: note = short peptide
KPKPPPRK

SEQ ID NO: 4381 - protein, 10 aa, synthetic construct
  REGION 1..10: note = short peptide
KSKSPERSKY

SEQ ID NO: 4382 - protein, 9 aa, synthetic construct
  REGION 1..9: note = short peptide
KPADVVSPK

SEQ ID NO: 4383 - protein, 9 aa, synthetic construct
  REGION 1..9: note = short peptide
KSGPPELRK

SEQ ID NO: 4384 - protein, 15 aa, synthetic construct
  REGION 1..15: note = short peptide
KPPFLSGENPFATVK

SEQ ID NO: 4385 - protein, 11 aa, synthetic construct
  REGION 1..11: note = short peptide
KSKSNPDFLKK

SEQ ID NO: 4386 - protein, 8 aa, synthetic construct
  REGION 1..8: note = short peptide
KPPNVSVF

SEQ ID NO: 4387 - protein, 10 aa, synthetic construct
  REGION 1..10: note = short peptide
KPSHKKYRAA

SEQ ID NO: 4388 - protein, 9 aa, synthetic construct
  REGION 1..9: note = short peptide
CSDKMSLLL

SEQ ID NO: 4389 - protein, 10 aa, synthetic construct
  REGION 1..10: note = short peptide
SLSCRPPMVK

SEQ ID NO: 4390 - protein, 9 aa, synthetic construct
  REGION 1..9: note = short peptide
RSFHGQCQL

SEQ ID NO: 4391 - protein, 9 aa, synthetic construct
  REGION 1..9: note = short peptide
ILRAKCQEL

SEQ ID NO: 4392 - protein, 9 aa, synthetic construct
  REGION 1..9: note = short peptide
TPDNIPADI

SEQ ID NO: 4393 - protein, 9 aa, synthetic construct
  REGION 1..9: note = short peptide
MPLIVPCTV

SEQ ID NO: 4394 - protein, 11 aa, synthetic construct
  REGION 1..11: note = short peptide
ILVGENLVCKV

SEQ ID NO: 4395 - protein, 9 aa, synthetic construct
  REGION 1..9: note = short peptide
VVFHCRHMF

SEQ ID NO: 4396 - protein, 10 aa, synthetic construct
  REGION 1..10: note = short peptide
IIHLGATSCY

SEQ ID NO: 4397 - protein, 11 aa, synthetic construct
  REGION 1..11: note = short peptide
HTPCTPHTTYR

SEQ ID NO: 4398 - protein, 9 aa, synthetic construct
  REGION 1..9: note = short peptide
MPLIVPCTV

SEQ ID NO: 4399 - protein, 9 aa, synthetic construct
  REGION 1..9: note = short peptide
TPMNLAVCL

SEQ ID NO: 4400 - protein, 9 aa, synthetic construct
  REGION 1..9: note = short peptide
SLGFNKPAA

SEQ ID NO: 4401 - protein, 9 aa, synthetic construct
  REGION 1..9: note = short peptide
HRHCDEVGF

SEQ ID NO: 4402 - protein, 9 aa, synthetic construct
  REGION 1..9: note = short peptide
TQCELLTQL

SEQ ID NO: 4403 - protein, 10 aa, synthetic construct
  REGION 1..10: note = short peptide
APSACRTLVL

SEQ ID NO: 4404 - protein, 8 aa, synthetic construct
  REGION 1..8: note = short peptide
NCILDVHF

SEQ ID NO: 4405 - protein, 8 aa, synthetic construct
  REGION 1..8: note = short peptide
MSLVKLQL

SEQ ID NO: 4406 - protein, 9 aa, synthetic construct
  REGION 1..9: note = short peptide
MNLEHKVLL

SEQ ID NO: 4407 - protein, 10 aa, synthetic construct
  REGION 1..10: note = short peptide
TPWDSCHHEA

SEQ ID NO: 4408 - protein, 9 aa, synthetic construct
  REGION 1..9: note = short peptide
TPTNLAVCL

SEQ ID NO: 4409 - protein, 10 aa, synthetic construct
  REGION 1..10: note = short peptide
YQKSTQLLLR

SEQ ID NO: 4410 - protein, 9 aa, synthetic construct
  REGION 1..9: note = short peptide
NAVSPLKSI

SEQ ID NO: 4411 - protein, 10 aa, synthetic construct
  REGION 1..10: note = short peptide
HTVGDGLTCR

SEQ ID NO: 4412 - protein, 9 aa, synthetic construct
  REGION 1..9: note = short peptide
SLHGRIYCK

SEQ ID NO: 4413 - protein, 9 aa, synthetic construct
  REGION 1..9: note = short peptide
MPMPEPCEL

SEQ ID NO: 4414 - protein, 9 aa, synthetic construct
  REGION 1..9: note = short peptide
SLHGRIYCK

SEQ ID NO: 4415 - protein, 9 aa, synthetic construct
  REGION 1..9: note = short peptide
YSCELPLCY

SEQ ID NO: 4416 - protein, 9 aa, synthetic construct
  REGION 1..9: note = short peptide
MPNQHACKL

SEQ ID NO: 4417 - protein, 11 aa, synthetic construct
  REGION 1..11: note = short peptide
MVKCDPRHGKY

SEQ ID NO: 4418 - protein, 10 aa, synthetic construct
  REGION 1..10: note = short peptide
NASLAQQLCR

SEQ ID NO: 4419 - protein, 10 aa, synthetic construct
  REGION 1..10: note = short peptide
RPRLLAALCG

SEQ ID NO: 4420 - protein, 9 aa, synthetic construct
  REGION 1..9: note = short peptide
SSCPSQNLK

SEQ ID NO: 4421 - protein, 9 aa, synthetic construct
  REGION 1..9: note = short peptide
SSCQTIIPK

SEQ ID NO: 4422 - protein, 8 aa, synthetic construct
  REGION 1..8: note = short peptide
TCLGIHLY

SEQ ID NO: 4423 - protein, 9 aa, synthetic construct
  REGION 1..9: note = short peptide
CMKSKFLQV

SEQ ID NO: 4424 - protein, 9 aa, synthetic construct
  REGION 1..9: note = short peptide
VVGCGGFVK

SEQ ID NO: 4425 - protein, 9 aa, synthetic construct
  REGION 1..9: note = short peptide
TAPLAICSL

SEQ ID NO: 4426 - protein, 10 aa, synthetic construct
  REGION 1..10: note = short peptide
LLMDEPLLCK

SEQ ID NO: 4427 - protein, 9 aa, synthetic construct
  REGION 1..9: note = short peptide
LLEKMGLCY

SEQ ID NO: 4428 - protein, 10 aa, synthetic construct
  REGION 1..10: note = short peptide
CLLDGVPVAL

SEQ ID NO: 4429 - protein, 9 aa, synthetic construct
  REGION 1..9: note = short peptide
CLKARVALL

SEQ ID NO: 4430 - protein, 8 aa, synthetic construct
  REGION 1..8: note = short peptide
SSPCHIEM

SEQ ID NO: 4431 - protein, 9 aa, synthetic construct
  REGION 1..9: note = short peptide
SSCGLPLGK

SEQ ID NO: 4432 - protein, 9 aa, synthetic construct
  REGION 1..9: note = short peptide
AMFGREFCY

SEQ ID NO: 4433 - protein, 13 aa, synthetic construct
  REGION 1..13: note = short peptide
KLLETECPQYIRK

SEQ ID NO: 4434 - protein, 9 aa, synthetic construct
  REGION 1..9: note = short peptide
KLNAEVACV

SEQ ID NO: 4435 - protein, 9 aa, synthetic construct
  REGION 1..9: note = short peptide
KLPDFSYCI

SEQ ID NO: 4436 - protein, 9 aa, synthetic construct
  REGION 1..9: note = short peptide
KLQSGTHCL

SEQ ID NO: 4437 - protein, 11 aa, synthetic construct
  REGION 1..11: note = short peptide
KLSCPALGISK

SEQ ID NO: 4438 - protein, 9 aa, synthetic construct
  REGION 1..9: note = short peptide
KLSDTYTCF

SEQ ID NO: 4439 - protein, 9 aa, synthetic construct
  REGION 1..9: note = short peptide
KLTDTICGV

SEQ ID NO: 4440 - protein, 9 aa, synthetic construct
  REGION 1..9: note = short peptide
KLWACNFCF

SEQ ID NO: 4441 - protein, 9 aa, synthetic construct
  REGION 1..9: note = short peptide
LPASYCDLL

SEQ ID NO: 4442 - protein, 9 aa, synthetic construct
  REGION 1..9: note = short peptide
KMAQNCQTF

SEQ ID NO: 4443 - protein, 9 aa, synthetic construct
  REGION 1..9: note = short peptide
SSCGELALK

SEQ ID NO: 4444 - protein, 10 aa, synthetic construct
  REGION 1..10: note = short peptide
LPAPCTPLSL

SEQ ID NO: 4445 - protein, 11 aa, synthetic construct
  REGION 1..11: note = short peptide
KMGDWKTCHSF

SEQ ID NO: 4446 - protein, 8 aa, synthetic construct
  REGION 1..8: note = short peptide
TEDKCLQR

SEQ ID NO: 4447 - protein, 8 aa, synthetic construct
  REGION 1..8: note = short peptide
TEDKCLQR

SEQ ID NO: 4448 - protein, 9 aa, synthetic construct
  REGION 1..9: note = short peptide
LLAAAVCTK

SEQ ID NO: 4449 - protein, 9 aa, synthetic construct
  REGION 1..9: note = short peptide
LARCPTAGL

SEQ ID NO: 4450 - protein, 9 aa, synthetic construct
  REGION 1..9: note = short peptide
KTCSKLKEK

SEQ ID NO: 4451 - protein, 12 aa, synthetic construct
  REGION 1..12: note = short peptide
KTFPACDGSHNK

SEQ ID NO: 4452 - protein, 9 aa, synthetic construct
  REGION 1..9: note = short peptide
KTFSYHHCF

SEQ ID NO: 4453 - protein, 9 aa, synthetic construct
  REGION 1..9: note = short peptide
KTFVGTPCW

SEQ ID NO: 4454 - protein, 12 aa, synthetic construct
  REGION 1..12: note = short peptide
STPEEKLAALCK

SEQ ID NO: 4455 - protein, 12 aa, synthetic construct
  REGION 1..12: note = short peptide
KYIGLDGNIACF

SEQ ID NO: 4456 - protein, 10 aa, synthetic construct
  REGION 1..10: note = short peptide
RVCEKNIKRF

SEQ ID NO: 4457 - protein, 9 aa, synthetic construct
  REGION 1..9: note = short peptide
SVIELTCTK

SEQ ID NO: 4458 - protein, 11 aa, synthetic construct
  REGION 1..11: note = short peptide
KTTQIGCLLRL

SEQ ID NO: 4459 - protein, 9 aa, synthetic construct
  REGION 1..9: note = short peptide
SVIEEGDCK

SEQ ID NO: 4460 - protein, 9 aa, synthetic construct
  REGION 1..9: note = short peptide
KVCGKTFKR

SEQ ID NO: 4461 - protein, 11 aa, synthetic construct
  REGION 1..11: note = short peptide
ALLCSSAILKR

SEQ ID NO: 4462 - protein, 10 aa, synthetic construct
  REGION 1..10: note = short peptide
KVFNGCPLKI

SEQ ID NO: 4463 - protein, 9 aa, synthetic construct
  REGION 1..9: note = short peptide
KVGEKLCEK

SEQ ID NO: 4464 - protein, 9 aa, synthetic construct
  REGION 1..9: note = short peptide
KVPEGGCSL

SEQ ID NO: 4465 - protein, 9 aa, synthetic construct
  REGION 1..9: note = short peptide
LARCPTAGL

SEQ ID NO: 4466 - protein, 9 aa, synthetic construct
  REGION 1..9: note = short peptide
KPYTNGIIA

SEQ ID NO: 4467 - protein, 9 aa, synthetic construct
  REGION 1..9: note = short peptide
KQFPCLFEF

SEQ ID NO: 4468 - protein, 9 aa, synthetic construct
  REGION 1..9: note = short peptide
CFWDNGHLY

SEQ ID NO: 4469 - protein, 9 aa, synthetic construct
  REGION 1..9: note = short peptide
KQSEDIISF

SEQ ID NO: 4470 - protein, 9 aa, synthetic construct
  REGION 1..9: note = short peptide
KQTCQTYSF

SEQ ID NO: 4471 - protein, 8 aa, synthetic construct
  REGION 1..8: note = short peptide
KQVLKDFL

SEQ ID NO: 4472 - protein, 15 aa, synthetic construct
  REGION 1..15: note = short peptide
KRFTDGITNKLVACY

SEQ ID NO: 4473 - protein, 11 aa, synthetic construct
  REGION 1..11: note = short peptide
VYLPNCDRKGF

SEQ ID NO: 4474 - protein, 9 aa, synthetic construct
  REGION 1..9: note = short peptide
RVDCTPLMY

SEQ ID NO: 4475 - protein, 12 aa, synthetic construct
  REGION 1..12: note = short peptide
STANGNDSKKFK

SEQ ID NO: 4476 - protein, 9 aa, synthetic construct
  REGION 1..9: note = short peptide
KRQKQKVCM

SEQ ID NO: 4477 - protein, 12 aa, synthetic construct
  REGION 1..12: note = short peptide
KRWCPGLKILSY

SEQ ID NO: 4478 - protein, 9 aa, synthetic construct
  REGION 1..9: note = short peptide
STCKNWYKK

SEQ ID NO: 4479 - protein, 9 aa, synthetic construct
  REGION 1..9: note = short peptide
KRYNVGCTK

SEQ ID NO: 4480 - protein, 9 aa, synthetic construct
  REGION 1..9: note = short peptide
LEKTVKNCL

SEQ ID NO: 4481 - protein, 10 aa, synthetic construct
  REGION 1..10: note = short peptide
STCNGIPSEK

SEQ ID NO: 4482 - protein, 9 aa, synthetic construct
  REGION 1..9: note = short peptide
SYGDCFDHF

SEQ ID NO: 4483 - protein, 11 aa, synthetic construct
  REGION 1..11: note = short peptide
SWVPKEGQCNF

SEQ ID NO: 4484 - protein, 10 aa, synthetic construct
  REGION 1..10: note = short peptide
STCPNIATSK

SEQ ID NO: 4485 - protein, 9 aa, synthetic construct
  REGION 1..9: note = short peptide
CLADHLLTA

SEQ ID NO: 4486 - protein, 9 aa, synthetic construct
  REGION 1..9: note = short peptide
LPIEACVML

SEQ ID NO: 4487 - protein, 9 aa, synthetic construct
  REGION 1..9: note = short peptide
KLIALAICK

SEQ ID NO: 4488 - protein, 9 aa, synthetic construct
  REGION 1..9: note = short peptide
TLEECVPRV

SEQ ID NO: 4489 - protein, 13 aa, synthetic construct
  REGION 1..13: note = short peptide
MCAQLPNPVLDSI

SEQ ID NO: 4490 - protein, 12 aa, synthetic construct
  REGION 1..12: note = short peptide
KEAPDGCPDHVL

SEQ ID NO: 4491 - protein, 9 aa, synthetic construct
  REGION 1..9: note = short peptide
ANIMVLNSL

SEQ ID NO: 4492 - protein, 9 aa, synthetic construct
  REGION 1..9: note = short peptide
LYYGGHLCY

SEQ ID NO: 4493 - protein, 9 aa, synthetic construct
  REGION 1..9: note = short peptide
SPTCLRALL

SEQ ID NO: 4494 - protein, 9 aa, synthetic construct
  REGION 1..9: note = short peptide
KEIDECVTL

SEQ ID NO: 4495 - protein, 10 aa, synthetic construct
  REGION 1..10: note = short peptide
KEIDECVTLL

SEQ ID NO: 4496 - protein, 9 aa, synthetic construct
  REGION 1..9: note = short peptide
LYLPKETCL

SEQ ID NO: 4497 - protein, 9 aa, synthetic construct
  REGION 1..9: note = short peptide
LYENCFHIL

SEQ ID NO: 4498 - protein, 11 aa, synthetic construct
  REGION 1..11: note = short peptide
KEKENGFSSPP

SEQ ID NO: 4499 - protein, 9 aa, synthetic construct
  REGION 1..9: note = short peptide
RSLSKAVCK

SEQ ID NO: 4500 - protein, 14 aa, synthetic construct
  REGION 1..14: note = short peptide
TIISDPTCEITQNT

SEQ ID NO: 4501 - protein, 9 aa, synthetic construct
  REGION 1..9: note = short peptide
KELNRWCSL

SEQ ID NO: 4502 - protein, 10 aa, synthetic construct
  REGION 1..10: note = short peptide
RVKLEGSKCK

SEQ ID NO: 4503 - protein, 9 aa, synthetic construct
  REGION 1..9: note = short peptide
SPMRDAPCL

SEQ ID NO: 4504 - protein, 9 aa, synthetic construct
  REGION 1..9: note = short peptide
MLSQPRISY

SEQ ID NO: 4505 - protein, 10 aa, synthetic construct
  REGION 1..10: note = short peptide
IQCQTRIIQI

SEQ ID NO: 4506 - protein, 10 aa, synthetic construct
  REGION 1..10: note = short peptide
TMYPGSCVKK

SEQ ID NO: 4507 - protein, 9 aa, synthetic construct
  REGION 1..9: note = short peptide
MLKKGACAV

SEQ ID NO: 4508 - protein, 10 aa, synthetic construct
  REGION 1..10: note = short peptide
TMSGVTTCLR

SEQ ID NO: 4509 - protein, 10 aa, synthetic construct
  REGION 1..10: note = short peptide
ITCSFPANGK

SEQ ID NO: 4510 - protein, 9 aa, synthetic construct
  REGION 1..9: note = short peptide
ITIDPTCSW

SEQ ID NO: 4511 - protein, 9 aa, synthetic construct
  REGION 1..9: note = short peptide
IVRCPTVRY

SEQ ID NO: 4512 - protein, 10 aa, synthetic construct
  REGION 1..10: note = short peptide
IWNPCSGHFY

SEQ ID NO: 4513 - protein, 9 aa, synthetic construct
  REGION 1..9: note = short peptide
SPFGQRVVK

SEQ ID NO: 4514 - protein, 8 aa, synthetic construct
  REGION 1..8: note = short peptide
CQKEKAEL

SEQ ID NO: 4515 - protein, 9 aa, synthetic construct
  REGION 1..9: note = short peptide
TLLMCIVTV

SEQ ID NO: 4516 - protein, 10 aa, synthetic construct
  REGION 1..10: note = short peptide
KENNPPGCHI

SEQ ID NO: 4517 - protein, 9 aa, synthetic construct
  REGION 1..9: note = short peptide
KLHQNICRK

SEQ ID NO: 4518 - protein, 10 aa, synthetic construct
  REGION 1..10: note = short peptide
KIDCNLLEFK

SEQ ID NO: 4519 - protein, 9 aa, synthetic construct
  REGION 1..9: note = short peptide
KIHSHSFKI

SEQ ID NO: 4520 - protein, 9 aa, synthetic construct
  REGION 1..9: note = short peptide
SRCLVKHIL

SEQ ID NO: 4521 - protein, 9 aa, synthetic construct
  REGION 1..9: note = short peptide
SREEGGCSL

SEQ ID NO: 4522 - protein, 11 aa, synthetic construct
  REGION 1..11: note = short peptide
CPIKSRKGDVL

SEQ ID NO: 4523 - protein, 10 aa, synthetic construct
  REGION 1..10: note = short peptide
AHADGDCFVF

SEQ ID NO: 4524 - protein, 12 aa, synthetic construct
  REGION 1..12: note = short peptide
TGNSSSLMPNSF

SEQ ID NO: 4525 - protein, 9 aa, synthetic construct
  REGION 1..9: note = short peptide
SRGNLCVNL

SEQ ID NO: 4526 - protein, 9 aa, synthetic construct
  REGION 1..9: note = short peptide
SRISCKEEL

SEQ ID NO: 4527 - protein, 9 aa, synthetic construct
  REGION 1..9: note = short peptide
SRKSCTVGM

SEQ ID NO: 4528 - protein, 9 aa, synthetic construct
  REGION 1..9: note = short peptide
SRLVLCKTF

SEQ ID NO: 4529 - protein, 9 aa, synthetic construct
  REGION 1..9: note = short peptide
VYDCVKLTF

SEQ ID NO: 4530 - protein, 9 aa, synthetic construct
  REGION 1..9: note = short peptide
KLHPSFKER

SEQ ID NO: 4531 - protein, 9 aa, synthetic construct
  REGION 1..9: note = short peptide
SRCEGELRL

SEQ ID NO: 4532 - protein, 11 aa, synthetic construct
  REGION 1..11: note = short peptide
LTDNCLYYFEY

SEQ ID NO: 4533 - protein, 9 aa, synthetic construct
  REGION 1..9: note = short peptide
LTCGTKLLY

SEQ ID NO: 4534 - protein, 14 aa, synthetic construct
  REGION 1..14: note = short peptide
LSVAPQQSLVLLED

SEQ ID NO: 4535 - protein, 9 aa, synthetic construct
  REGION 1..9: note = short peptide
THVCTHVIL

SEQ ID NO: 4536 - protein, 9 aa, synthetic construct
  REGION 1..9: note = short peptide
SQFLSLQCL

SEQ ID NO: 4537 - protein, 10 aa, synthetic construct
  REGION 1..10: note = short peptide
SQHGPSVCSF

SEQ ID NO: 4538 - protein, 10 aa, synthetic construct
  REGION 1..10: note = short peptide
KEVCRDFAVL

SEQ ID NO: 4539 - protein, 9 aa, synthetic construct
  REGION 1..9: note = short peptide
SQKTTILNI

SEQ ID NO: 4540 - protein, 8 aa, synthetic construct
  REGION 1..8: note = short peptide
THQETRCL

SEQ ID NO: 4541 - protein, 11 aa, synthetic construct
  REGION 1..11: note = short peptide
RTADNFNDILK

SEQ ID NO: 4542 - protein, 9 aa, synthetic construct
  REGION 1..9: note = short peptide
AGCDSYTPK

SEQ ID NO: 4543 - protein, 10 aa, synthetic construct
  REGION 1..10: note = short peptide
KGGIQIMAGK

SEQ ID NO: 4544 - protein, 9 aa, synthetic construct
  REGION 1..9: note = short peptide
LPVTETVCL

SEQ ID NO: 4545 - protein, 9 aa, synthetic construct
  REGION 1..9: note = short peptide
AGCGKTYTK

SEQ ID NO: 4546 - protein, 9 aa, synthetic construct
  REGION 1..9: note = short peptide
YPDEKSVCL

SEQ ID NO: 4547 - protein, 9 aa, synthetic construct
  REGION 1..9: note = short peptide
CSTPIATER

SEQ ID NO: 4548 - protein, 9 aa, synthetic construct
  REGION 1..9: note = short peptide
LLAPVTLCY

SEQ ID NO: 4549 - protein, 8 aa, synthetic construct
  REGION 1..8: note = short peptide
QQRLKEIQ

SEQ ID NO: 4550 - protein, 8 aa, synthetic construct
  REGION 1..8: note = short peptide
SGVRLGQK

SEQ ID NO: 4551 - protein, 9 aa, synthetic construct
  REGION 1..9: note = short peptide
GESEGCRSF

SEQ ID NO: 4552 - protein, 9 aa, synthetic construct
  REGION 1..9: note = short peptide
EHACVVAGL

SEQ ID NO: 4553 - protein, 11 aa, synthetic construct
  REGION 1..11: note = short peptide
SEASTCVIIKL

SEQ ID NO: 4554 - protein, 9 aa, synthetic construct
  REGION 1..9: note = short peptide
EGNVKLCSL

SEQ ID NO: 4555 - protein, 14 aa, synthetic construct
  REGION 1..14: note = short peptide
VDPVNFKLLSHCLL

SEQ ID NO: 4556 - protein, 10 aa, synthetic construct
  REGION 1..10: note = short peptide
PYVGPIIPCI

SEQ ID NO: 4557 - protein, 9 aa, synthetic construct
  REGION 1..9: note = short peptide
VCVLAHHFG

SEQ ID NO: 4558 - protein, 15 aa, synthetic construct
  REGION 1..15: note = short peptide
VCTIISDPTCEITQN

SEQ ID NO: 4559 - protein, 9 aa, synthetic construct
  REGION 1..9: note = short peptide
PVQLPSPAC

SEQ ID NO: 4560 - protein, 9 aa, synthetic construct
  REGION 1..9: note = short peptide
GHFCGVAEM

SEQ ID NO: 4561 - protein, 9 aa, synthetic construct
  REGION 1..9: note = short peptide
AVCEQVFRK

SEQ ID NO: 4562 - protein, 9 aa, synthetic construct
  REGION 1..9: note = short peptide
GHHAKIVCL

SEQ ID NO: 4563 - protein, 9 aa, synthetic construct
  REGION 1..9: note = short peptide
GHHNCSESL

SEQ ID NO: 4564 - protein, 9 aa, synthetic construct
  REGION 1..9: note = short peptide
DVITCFANF

SEQ ID NO: 4565 - protein, 10 aa, synthetic construct
  REGION 1..10: note = short peptide
ASFFNSLLSK

SEQ ID NO: 4566 - protein, 8 aa, synthetic construct
  REGION 1..8: note = short peptide
GCVPVANK

SEQ ID NO: 4567 - protein, 11 aa, synthetic construct
  REGION 1..11: note = short peptide
ASFDATTCIWK

SEQ ID NO: 4568 - protein, 9 aa, synthetic construct
  REGION 1..9: note = short peptide
EIVCKISQF

SEQ ID NO: 4569 - protein, 9 aa, synthetic construct
  REGION 1..9: note = short peptide
CYLDKPEEW

SEQ ID NO: 4570 - protein, 11 aa, synthetic construct
  REGION 1..11: note = short peptide
EIAITNGCINR

SEQ ID NO: 4571 - protein, 9 aa, synthetic construct
  REGION 1..9: note = short peptide
QELPVCQEL

SEQ ID NO: 4572 - protein, 9 aa, synthetic construct
  REGION 1..9: note = short peptide
EHSVGIICF

SEQ ID NO: 4573 - protein, 10 aa, synthetic construct
  REGION 1..10: note = short peptide
AEAELKCVVL

SEQ ID NO: 4574 - protein, 9 aa, synthetic construct
  REGION 1..9: note = short peptide
RETDCGVHI

SEQ ID NO: 4575 - protein, 9 aa, synthetic construct
  REGION 1..9: note = short peptide
EHNRDCILL

SEQ ID NO: 4576 - protein, 10 aa, synthetic construct
  REGION 1..10: note = short peptide
GELKVVNGAA

SEQ ID NO: 4577 - protein, 9 aa, synthetic construct
  REGION 1..9: note = short peptide
PQGDLQPVL

SEQ ID NO: 4578 - protein, 10 aa, synthetic construct
  REGION 1..10: note = short peptide
PAQGALDFTR

SEQ ID NO: 4579 - protein, 10 aa, synthetic construct
  REGION 1..10: note = short peptide
GMPHKCYHGK

SEQ ID NO: 4580 - protein, 9 aa, synthetic construct
  REGION 1..9: note = short peptide
EAVLNTTCK

SEQ ID NO: 4581 - protein, 9 aa, synthetic construct
  REGION 1..9: note = short peptide
EAVKLCDSY

SEQ ID NO: 4582 - protein, 9 aa, synthetic construct
  REGION 1..9: note = short peptide
SDLQRCVNL

SEQ ID NO: 4583 - protein, 10 aa, synthetic construct
  REGION 1..10: note = short peptide
WCPTGFKVGI

SEQ ID NO: 4584 - protein, 11 aa, synthetic construct
  REGION 1..11: note = short peptide
TYPCPPHFNHL

SEQ ID NO: 4585 - protein, 9 aa, synthetic construct
  REGION 1..9: note = short peptide
RRIQSCVHF

SEQ ID NO: 4586 - protein, 9 aa, synthetic construct
  REGION 1..9: note = short peptide
SDIVRVCFF

SEQ ID NO: 4587 - protein, 9 aa, synthetic construct
  REGION 1..9: note = short peptide
YLAGCLVHA

SEQ ID NO: 4588 - protein, 9 aa, synthetic construct
  REGION 1..9: note = short peptide
AVGKTCLLI

SEQ ID NO: 4589 - protein, 13 aa, synthetic construct
  REGION 1..13: note = short peptide
NVYGDCDNYATLK

SEQ ID NO: 4590 - protein, 10 aa, synthetic construct
  REGION 1..10: note = short peptide
GQCDLELINV

SEQ ID NO: 4591 - protein, 10 aa, synthetic construct
  REGION 1..10: note = short peptide
GQCGDILTNK

SEQ ID NO: 4592 - protein, 10 aa, synthetic construct
  REGION 1..10: note = short peptide
GQCQNSFVKV

SEQ ID NO: 4593 - protein, 9 aa, synthetic construct
  REGION 1..9: note = short peptide
GQCSVPLKK

SEQ ID NO: 4594 - protein, 10 aa, synthetic construct
  REGION 1..10: note = short peptide
GQKNGRGVIF

SEQ ID NO: 4595 - protein, 9 aa, synthetic construct
  REGION 1..9: note = short peptide
NVRCESEVF

SEQ ID NO: 4596 - protein, 8 aa, synthetic construct
  REGION 1..8: note = short peptide
DAVCTRSV

SEQ ID NO: 4597 - protein, 8 aa, synthetic construct
  REGION 1..8: note = short peptide
GQVLSVCV

SEQ ID NO: 4598 - protein, 9 aa, synthetic construct
  REGION 1..9: note = short peptide
GMCGGVRGV

SEQ ID NO: 4599 - protein, 9 aa, synthetic construct
  REGION 1..9: note = short peptide
RILKVLWCF

SEQ ID NO: 4600 - protein, 15 aa, synthetic construct
  REGION 1..15: note = short peptide
GIHETTFNSIMKCDV

SEQ ID NO: 4601 - protein, 9 aa, synthetic construct
  REGION 1..9: note = short peptide
SHDLDPRCV

SEQ ID NO: 4602 - protein, 14 aa, synthetic construct
  REGION 1..14: note = short peptide
CVVINPYKNLPIYS

SEQ ID NO: 4603 - protein, 11 aa, synthetic construct
  REGION 1..11: note = short peptide
AVCESHIGWRK

SEQ ID NO: 4604 - protein, 11 aa, synthetic construct
  REGION 1..11: note = short peptide
AVCGPQSSTWK

SEQ ID NO: 4605 - protein, 10 aa, synthetic construct
  REGION 1..10: note = short peptide
SDMSLTACKV

SEQ ID NO: 4606 - protein, 9 aa, synthetic construct
  REGION 1..9: note = short peptide
ASCPYSQER

SEQ ID NO: 4607 - protein, 10 aa, synthetic construct
  REGION 1..10: note = short peptide
EVASAVCLRL

SEQ ID NO: 4608 - protein, 11 aa, synthetic construct
  REGION 1..11: note = short peptide
GLLQDSGLCVV

SEQ ID NO: 4609 - protein, 9 aa, synthetic construct
  REGION 1..9: note = short peptide
SHLPFDCVL

SEQ ID NO: 4610 - protein, 8 aa, synthetic construct
  REGION 1..8: note = short peptide
YIHEKECL

SEQ ID NO: 4611 - protein, 11 aa, synthetic construct
  REGION 1..11: note = short peptide
VLSECIEGVKV

SEQ ID NO: 4612 - protein, 9 aa, synthetic construct
  REGION 1..9: note = short peptide
VLCPPKYLK

SEQ ID NO: 4613 - protein, 10 aa, synthetic construct
  REGION 1..10: note = short peptide
FACNGTVIEH

SEQ ID NO: 4614 - protein, 9 aa, synthetic construct
  REGION 1..9: note = short peptide
VLAKICQKI

SEQ ID NO: 4615 - protein, 12 aa, synthetic construct
  REGION 1..12: note = short peptide
FAPCSVAPGKSL

SEQ ID NO: 4616 - protein, 10 aa, synthetic construct
  REGION 1..10: note = short peptide
ESVENGHRKR

SEQ ID NO: 4617 - protein, 10 aa, synthetic construct
  REGION 1..10: note = short peptide
ATWSDLGLCK

SEQ ID NO: 4618 - protein, 13 aa, synthetic construct
  REGION 1..13: note = short peptide
QVIDIATGRAVEP

SEQ ID NO: 4619 - protein, 10 aa, synthetic construct
  REGION 1..10: note = short peptide
QTPKVAKQEK

SEQ ID NO: 4620 - protein, 11 aa, synthetic construct
  REGION 1..11: note = short peptide
ESENNKLCSLY

SEQ ID NO: 4621 - protein, 8 aa, synthetic construct
  REGION 1..8: note = short peptide
VINYAVKI

SEQ ID NO: 4622 - protein, 10 aa, synthetic construct
  REGION 1..10: note = short peptide
FIADHCPTLR

SEQ ID NO: 4623 - protein, 9 aa, synthetic construct
  REGION 1..9: note = short peptide
YHCGESHTI

SEQ ID NO: 4624 - protein, 9 aa, synthetic construct
  REGION 1..9: note = short peptide
FLAESCATL

SEQ ID NO: 4625 - protein, 9 aa, synthetic construct
  REGION 1..9: note = short peptide
FLCPFHLSV

SEQ ID NO: 4626 - protein, 9 aa, synthetic construct
  REGION 1..9: note = short peptide
VIFCNTKRK

SEQ ID NO: 4627 - protein, 9 aa, synthetic construct
  REGION 1..9: note = short peptide
EVVNILNCF

SEQ ID NO: 4628 - protein, 12 aa, synthetic construct
  REGION 1..12: note = short peptide
EVVGHITEGVCR

SEQ ID NO: 4629 - protein, 9 aa, synthetic construct
  REGION 1..9: note = short peptide
RAYALCVLY

SEQ ID NO: 4630 - protein, 11 aa, synthetic construct
  REGION 1..11: note = short peptide
ATRSLSKAVCK

SEQ ID NO: 4631 - protein, 13 aa, synthetic construct
  REGION 1..13: note = short peptide
EVIDHPDVKCQTK

SEQ ID NO: 4632 - protein, 12 aa, synthetic construct
  REGION 1..12: note = short peptide
EVIEGYEIACRK

SEQ ID NO: 4633 - protein, 10 aa, synthetic construct
  REGION 1..10: note = short peptide
VLIEDCIPVL

SEQ ID NO: 4634 - protein, 12 aa, synthetic construct
  REGION 1..12: note = short peptide
ETFCLDPSLVTK

SEQ ID NO: 4635 - protein, 9 aa, synthetic construct
  REGION 1..9: note = short peptide
RAGAPRCTY

SEQ ID NO: 4636 - protein, 9 aa, synthetic construct
  REGION 1..9: note = short peptide
EVKGKGVCR

SEQ ID NO: 4637 - protein, 11 aa, synthetic construct
  REGION 1..11: note = short peptide
ETQMSQNVCPR

SEQ ID NO: 4638 - protein, 11 aa, synthetic construct
  REGION 1..11: note = short peptide
EVPNCQSSYMR

SEQ ID NO: 4639 - protein, 10 aa, synthetic construct
  REGION 1..10: note = short peptide
FLSYCPGMGV

SEQ ID NO: 4640 - protein, 9 aa, synthetic construct
  REGION 1..9: note = short peptide
RRCDRVTRL

SEQ ID NO: 4641 - protein, 9 aa, synthetic construct
  REGION 1..9: note = short peptide
FQYDVISCL

SEQ ID NO: 4642 - protein, 9 aa, synthetic construct
  REGION 1..9: note = short peptide
REKVGECEA

SEQ ID NO: 4643 - protein, 15 aa, synthetic construct
  REGION 1..15: note = short peptide
FTPTEKDEYACRVNH

SEQ ID NO: 4644 - protein, 10 aa, synthetic construct
  REGION 1..10: note = short peptide
QLLPNSQSFI

SEQ ID NO: 4645 - protein, 9 aa, synthetic construct
  REGION 1..9: note = short peptide
QLLNCLHVV

SEQ ID NO: 4646 - protein, 9 aa, synthetic construct
  REGION 1..9: note = short peptide
FQIGPCEGI

SEQ ID NO: 4647 - protein, 11 aa, synthetic construct
  REGION 1..11: note = short peptide
QQHCASPAFAY

SEQ ID NO: 4648 - protein, 9 aa, synthetic construct
  REGION 1..9: note = short peptide
FPYKCLNSL

SEQ ID NO: 4649 - protein, 8 aa, synthetic construct
  REGION 1..8: note = short peptide
QSTTLGAS

SEQ ID NO: 4650 - protein, 11 aa, synthetic construct
  REGION 1..11: note = short peptide
VHSMCQTAQSF

SEQ ID NO: 4651 - protein, 10 aa, synthetic construct
  REGION 1..10: note = short peptide
VHQDSNCNGI

SEQ ID NO: 4652 - protein, 10 aa, synthetic construct
  REGION 1..10: note = short peptide
ATAPVSAAQL

SEQ ID NO: 4653 - protein, 10 aa, synthetic construct
  REGION 1..10: note = short peptide
FPHISQCEEL

SEQ ID NO: 4654 - protein, 9 aa, synthetic construct
  REGION 1..9: note = short peptide
ASNGCVLVH

SEQ ID NO: 4655 - protein, 9 aa, synthetic construct
  REGION 1..9: note = short peptide
ASNGCVLVH

SEQ ID NO: 4656 - protein, 8 aa, synthetic construct
  REGION 1..8: note = short peptide
EMSRINHY

SEQ ID NO: 4657 - protein, 10 aa, synthetic construct
  REGION 1..10: note = short peptide
NVQGPDWHLK

SEQ ID NO: 4658 - protein, 9 aa, synthetic construct
  REGION 1..9: note = short peptide
NNSVKTTGW

SEQ ID NO: 4659 - protein, 9 aa, synthetic construct
  REGION 1..9: note = short peptide
TVDKTVCKK

SEQ ID NO: 4660 - protein, 9 aa, synthetic construct
  REGION 1..9: note = short peptide
VTCPGVVLK

SEQ ID NO: 4661 - protein, 9 aa, synthetic construct
  REGION 1..9: note = short peptide
VQSTTGHCV

SEQ ID NO: 4662 - protein, 9 aa, synthetic construct
  REGION 1..9: note = short peptide
NLVNVPLCV

SEQ ID NO: 4663 - protein, 9 aa, synthetic construct
  REGION 1..9: note = short peptide
VQSTTGHCV

SEQ ID NO: 4664 - protein, 9 aa, synthetic construct
  REGION 1..9: note = short peptide
RMSEKKCSW

SEQ ID NO: 4665 - protein, 13 aa, synthetic construct
  REGION 1..13: note = short peptide
TVFACLMGRGMKR

SEQ ID NO: 4666 - protein, 9 aa, synthetic construct
  REGION 1..9: note = short peptide
DLKQTLCSF

SEQ ID NO: 4667 - protein, 8 aa, synthetic construct
  REGION 1..8: note = short peptide
DLCQKVTL

SEQ ID NO: 4668 - protein, 9 aa, synthetic construct
  REGION 1..9: note = short peptide
HESEVFICA

SEQ ID NO: 4669 - protein, 9 aa, synthetic construct
  REGION 1..9: note = short peptide
AVNGCVTGH

SEQ ID NO: 4670 - protein, 9 aa, synthetic construct
  REGION 1..9: note = short peptide
NLGELCQRL

SEQ ID NO: 4671 - protein, 9 aa, synthetic construct
  REGION 1..9: note = short peptide
SLCGKAFYK

SEQ ID NO: 4672 - protein, 10 aa, synthetic construct
  REGION 1..10: note = short peptide
AEKCPNLTYL

SEQ ID NO: 4673 - protein, 9 aa, synthetic construct
  REGION 1..9: note = short peptide
HAVTDTECL

SEQ ID NO: 4674 - protein, 11 aa, synthetic construct
  REGION 1..11: note = short peptide
GVCANGLLIYK

SEQ ID NO: 4675 - protein, 9 aa, synthetic construct
  REGION 1..9: note = short peptide
AEHGPTHCL

SEQ ID NO: 4676 - protein, 9 aa, synthetic construct
  REGION 1..9: note = short peptide
SIFDCVYTV

SEQ ID NO: 4677 - protein, 9 aa, synthetic construct
  REGION 1..9: note = short peptide
SIGPSIVCK

SEQ ID NO: 4678 - protein, 9 aa, synthetic construct
  REGION 1..9: note = short peptide
VYVIVRCKL

SEQ ID NO: 4679 - protein, 9 aa, synthetic construct
  REGION 1..9: note = short peptide
VQQAGQLAR

SEQ ID NO: 4680 - protein, 9 aa, synthetic construct
  REGION 1..9: note = short peptide
CVDDTLIVL

SEQ ID NO: 4681 - protein, 10 aa, synthetic construct
  REGION 1..10: note = short peptide
RLYPCPLFSV

SEQ ID NO: 4682 - protein, 10 aa, synthetic construct
  REGION 1..10: note = short peptide
NQDGTCSVSY

SEQ ID NO: 4683 - protein, 8 aa, synthetic construct
  REGION 1..8: note = short peptide
DPYCLVKV

SEQ ID NO: 4684 - protein, 9 aa, synthetic construct
  REGION 1..9: note = short peptide
AQTCQKAGI

SEQ ID NO: 4685 - protein, 9 aa, synthetic construct
  REGION 1..9: note = short peptide
AQNKAMKCL

SEQ ID NO: 4686 - protein, 9 aa, synthetic construct
  REGION 1..9: note = short peptide
NPNNITCVL

SEQ ID NO: 4687 - protein, 9 aa, synthetic construct
  REGION 1..9: note = short peptide
HAHSRECSL

SEQ ID NO: 4688 - protein, 9 aa, synthetic construct
  REGION 1..9: note = short peptide
AVNGCVTGH

SEQ ID NO: 4689 - protein, 12 aa, synthetic construct
  REGION 1..12: note = short peptide
ARFEELCSDLFR

SEQ ID NO: 4690 - protein, 12 aa, synthetic construct
  REGION 1..12: note = short peptide
HPAGDNVICGSY

SEQ ID NO: 4691 - protein, 10 aa, synthetic construct
  REGION 1..10: note = short peptide
HLHESCVLSL

SEQ ID NO: 4692 - protein, 11 aa, synthetic construct
  REGION 1..11: note = short peptide
TSVSGAGCTTY

SEQ ID NO: 4693 - protein, 10 aa, synthetic construct
  REGION 1..10: note = short peptide
HLKQKHVLCA

SEQ ID NO: 4694 - protein, 10 aa, synthetic construct
  REGION 1..10: note = short peptide
TSTCSPIISK

SEQ ID NO: 4695 - protein, 9 aa, synthetic construct
  REGION 1..9: note = short peptide
NGSESRFFV

SEQ ID NO: 4696 - protein, 8 aa, synthetic construct
  REGION 1..8: note = short peptide
NEWRGMVL

SEQ ID NO: 4697 - protein, 10 aa, synthetic construct
  REGION 1..10: note = short peptide
HPACVNEIAL

SEQ ID NO: 4698 - protein, 9 aa, synthetic construct
  REGION 1..9: note = short peptide
NETIWYVRF

SEQ ID NO: 4699 - protein, 9 aa, synthetic construct
  REGION 1..9: note = short peptide
DGYQSYCTI

SEQ ID NO: 4700 - protein, 11 aa, synthetic construct
  REGION 1..11: note = short peptide
DIPHCNVVVRY

SEQ ID NO: 4701 - protein, 9 aa, synthetic construct
  REGION 1..9: note = short peptide
RYAGLYFCI

SEQ ID NO: 4702 - protein, 9 aa, synthetic construct
  REGION 1..9: note = short peptide
RVYQSLCPT

SEQ ID NO: 4703 - protein, 8 aa, synthetic construct
  REGION 1..8: note = short peptide
DGLCTPLV

SEQ ID NO: 4704 - protein, 8 aa, synthetic construct
  REGION 1..8: note = short peptide
DESECRVV

SEQ ID NO: 4705 - protein, 8 aa, synthetic construct
  REGION 1..8: note = short peptide
DEQCVVGK

SEQ ID NO: 4706 - protein, 9 aa, synthetic construct
  REGION 1..9: note = short peptide
AVYCKFHYK

SEQ ID NO: 4707 - protein, 9 aa, synthetic construct
  REGION 1..9: note = short peptide
SLCQRLVKL

SEQ ID NO: 4708 - protein, 9 aa, synthetic construct
  REGION 1..9: note = short peptide
DIPETCVHY

SEQ ID NO: 4709 - protein, 9 aa, synthetic construct
  REGION 1..9: note = short peptide
HHCPKTPFL

SEQ ID NO: 4710 - protein, 9 aa, synthetic construct
  REGION 1..9: note = short peptide
DIIDDLPCR

SEQ ID NO: 4711 - protein, 9 aa, synthetic construct
  REGION 1..9: note = short peptide
HHIEMACTL

SEQ ID NO: 4712 - protein, 12 aa, synthetic construct
  REGION 1..12: note = short peptide
AVVCEETALITR

SEQ ID NO: 4713 - protein, 8 aa, synthetic construct
  REGION 1..8: note = short peptide
HHNCSESL

SEQ ID NO: 4714 - protein, 8 aa, synthetic construct
  REGION 1..8: note = short peptide
DHILQHLL

SEQ ID NO: 4715 - protein, 9 aa, synthetic construct
  REGION 1..9: note = short peptide
TTSCGSLAY

SEQ ID NO: 4716 - protein, 9 aa, synthetic construct
  REGION 1..9: note = short peptide
DHDCVLVLL

SEQ ID NO: 4717 - protein, 8 aa, synthetic construct
  REGION 1..8: note = short peptide
TTDRCLLN

SEQ ID NO: 4718 - protein, 9 aa, synthetic construct
  REGION 1..9: note = short peptide
TTDCLQILA

SEQ ID NO: 4719 - protein, 9 aa, synthetic construct
  REGION 1..9: note = short peptide
DHDCVLVLL

SEQ ID NO: 4720 - protein, 11 aa, synthetic construct
  REGION 1..11: note = short peptide
ARCSNVTIIRI

SEQ ID NO: 4721 - protein, 9 aa, synthetic construct
  REGION 1..9: note = short peptide
SICGTLHSV

SEQ ID NO: 4722 - protein, 9 aa, synthetic construct
  REGION 1..9: note = short peptide
GSCTKAFAK

SEQ ID NO: 4723 - protein, 9 aa, synthetic construct
  REGION 1..9: note = short peptide
ARKAFNCKY

SEQ ID NO: 4724 - protein, 11 aa, synthetic construct
  REGION 1..11: note = short peptide
GSDESLIACKA

SEQ ID NO: 4725 - protein, 13 aa, synthetic construct
  REGION 1..13: note = short peptide
TVVGFVCQDPAQR

SEQ ID NO: 4726 - protein, 9 aa, synthetic construct
  REGION 1..9: note = short peptide
CEAPAVPAL

SEQ ID NO: 4727 - protein, 11 aa, synthetic construct
  REGION 1..11: note = short peptide
CVLSEEQIRKK

SEQ ID NO: 4728 - protein, 9 aa, synthetic construct
  REGION 1..9: note = short peptide
ARTPLCLVY

SEQ ID NO: 4729 - protein, 9 aa, synthetic construct
  REGION 1..9: note = short peptide
SHTEVHQCL

SEQ ID NO: 4730 - protein, 12 aa, synthetic construct
  REGION 1..12: note = short peptide
GSGEADCGLRPL

SEQ ID NO: 4731 - protein, 9 aa, synthetic construct
  REGION 1..9: note = short peptide
AVMPHFVCL

SEQ ID NO: 4732 - protein, 10 aa, synthetic construct
  REGION 1..10: note = short peptide
ARLVLGCITM

SEQ ID NO: 4733 - protein, 11 aa, synthetic construct
  REGION 1..11: note = short peptide
AVISTATCMRR

SEQ ID NO: 4734 - protein, 10 aa, synthetic construct
  REGION 1..10: note = short peptide
GRLLRGHNQF

SEQ ID NO: 4735 - protein, 8 aa, synthetic construct
  REGION 1..8: note = short peptide
ADAGLVCI

SEQ ID NO: 4736 - protein, 9 aa, synthetic construct
  REGION 1..9: note = short peptide
DTIARLPCL

SEQ ID NO: 4737 - protein, 13 aa, synthetic construct
  REGION 1..13: note = short peptide
SAQGSDVSLTACK

SEQ ID NO: 4738 - protein, 9 aa, synthetic construct
  REGION 1..9: note = short peptide
DTAHIFCQW

SEQ ID NO: 4739 - protein, 10 aa, synthetic construct
  REGION 1..10: note = short peptide
GSCDPQVILK

SEQ ID NO: 4740 - protein, 10 aa, synthetic construct
  REGION 1..10: note = short peptide
CVIAGQGVAW

SEQ ID NO: 4741 - protein, 12 aa, synthetic construct
  REGION 1..12: note = short peptide
GTLPNRFVITPR

SEQ ID NO: 4742 - protein, 9 aa, synthetic construct
  REGION 1..9: note = short peptide
CVGETGIGK

SEQ ID NO: 4743 - protein, 8 aa, synthetic construct
  REGION 1..8: note = short peptide
DSCDRLTQ

SEQ ID NO: 4744 - protein, 9 aa, synthetic construct
  REGION 1..9: note = short peptide
DTICGVGNM

SEQ ID NO: 4745 - protein, 12 aa, synthetic construct
  REGION 1..12: note = short peptide
APNNGQNKSLAA

SEQ ID NO: 4746 - protein, 9 aa, synthetic construct
  REGION 1..9: note = short peptide
RLNDCYKEK

SEQ ID NO: 4747 - protein, 9 aa, synthetic construct
  REGION 1..9: note = short peptide
RMTDKCFRK

SEQ ID NO: 4748 - protein, 8 aa, synthetic construct
  REGION 1..8: note = short peptide
NGFLMRKV

SEQ ID NO: 4749 - protein, 9 aa, synthetic construct
  REGION 1..9: note = short peptide
QLQTTCHTL

SEQ ID NO: 4750 - protein, 11 aa, synthetic construct
  REGION 1..11: note = short peptide
QQVQQQAVQNR

SEQ ID NO: 4751 - protein, 10 aa, synthetic construct
  REGION 1..10: note = short peptide
NVVNIQTGHW

SEQ ID NO: 4752 - protein, 8 aa, synthetic construct
  REGION 1..8: note = short peptide
PFLNSGTY

SEQ ID NO: 4753 - protein, 13 aa, synthetic construct
  REGION 1..13: note = short peptide
NTILTTRSYPQLR

SEQ ID NO: 4754 - protein, 11 aa, synthetic construct
  REGION 1..11: note = short peptide
KSLDEQCVVGK

SEQ ID NO: 4755 - protein, 9 aa, synthetic construct
  REGION 1..9: note = short peptide
REKECGVTA

SEQ ID NO: 4756 - protein, 9 aa, synthetic construct
  REGION 1..9: note = short peptide
TVCGKHFSR

SEQ ID NO: 4757 - protein, 11 aa, synthetic construct
  REGION 1..11: note = short peptide
TSNHQKISSGK

SEQ ID NO: 4758 - protein, 10 aa, synthetic construct
  REGION 1..10: note = short peptide
QTQKEVEVTR

SEQ ID NO: 4759 - protein, 11 aa, synthetic construct
  REGION 1..11: note = short peptide
QVKRPGDLNVK

SEQ ID NO: 4760 - protein, 10 aa, synthetic construct
  REGION 1..10: note = short peptide
LPVENREAVL

SEQ ID NO: 4761 - protein, 9 aa, synthetic construct
  REGION 1..9: note = short peptide
VADQLCAKY

SEQ ID NO: 4762 - protein, 9 aa, synthetic construct
  REGION 1..9: note = short peptide
DSETSACRY

SEQ ID NO: 4763 - protein, 8 aa, synthetic construct
  REGION 1..8: note = short peptide
VQRCQQAY

SEQ ID NO: 4764 - protein, 9 aa, synthetic construct
  REGION 1..9: note = short peptide
ILCPKPVHV

SEQ ID NO: 4765 - protein, 8 aa, synthetic construct
  REGION 1..8: note = short peptide
SANVLPTL

SEQ ID NO: 4766 - protein, 9 aa, synthetic construct
  REGION 1..9: note = short peptide
HTLCSFYKY

SEQ ID NO: 4767 - protein, 9 aa, synthetic construct
  REGION 1..9: note = short peptide
HQTSECIKI

SEQ ID NO: 4768 - protein, 9 aa, synthetic construct
  REGION 1..9: note = short peptide
IHHNCTPEF

SEQ ID NO: 4769 - protein, 9 aa, synthetic construct
  REGION 1..9: note = short peptide
GLTFPFICK

SEQ ID NO: 4770 - protein, 13 aa, synthetic construct
  REGION 1..13: note = short peptide
TASHVQSSPVQSD

SEQ ID NO: 4771 - protein, 9 aa, synthetic construct
  REGION 1..9: note = short peptide
THLCDEVSL

SEQ ID NO: 4772 - protein, 9 aa, synthetic construct
  REGION 1..9: note = short peptide
RQASKACVV

SEQ ID NO: 4773 - protein, 8 aa, synthetic construct
  REGION 1..8: note = short peptide
YTDHQNSS

SEQ ID NO: 4774 - protein, 9 aa, synthetic construct
  REGION 1..9: note = short peptide
KICAVGITK

SEQ ID NO: 4775 - protein, 8 aa, synthetic construct
  REGION 1..8: note = short peptide
HIISGTCA

SEQ ID NO: 4776 - protein, 10 aa, synthetic construct
  REGION 1..10: note = short peptide
RSSDKGRLCY

SEQ ID NO: 4777 - protein, 9 aa, synthetic construct
  REGION 1..9: note = short peptide
ALGSCLNNK

SEQ ID NO: 4778 - protein, 10 aa, synthetic construct
  REGION 1..10: note = short peptide
KTHTIQGTIK

SEQ ID NO: 4779 - protein, 12 aa, synthetic construct
  REGION 1..12: note = short peptide
KTHTLCRRCGSK

SEQ ID NO: 4780 - protein, 9 aa, synthetic construct
  REGION 1..9: note = short peptide
KTWKGSIGL

SEQ ID NO: 4781 - protein, 8 aa, synthetic construct
  REGION 1..8: note = short peptide
YGNSFGAW

SEQ ID NO: 4782 - protein, 9 aa, synthetic construct
  REGION 1..9: note = short peptide
VFNEKGWNY

SEQ ID NO: 4783 - protein, 10 aa, synthetic construct
  REGION 1..10: note = short peptide
VVWPQPATTK

SEQ ID NO: 4784 - protein, 13 aa, synthetic construct
  REGION 1..13: note = short peptide
YLQQCPFEDHVKL

SEQ ID NO: 4785 - protein, 10 aa, synthetic construct
  REGION 1..10: note = short peptide
TVLGSSQIIL

SEQ ID NO: 4786 - protein, 11 aa, synthetic construct
  REGION 1..11: note = short peptide
LNGLPGPIGPP

SEQ ID NO: 4787 - protein, 9 aa, synthetic construct
  REGION 1..9: note = short peptide
KVLLLELKH

SEQ ID NO: 4788 - protein, 10 aa, synthetic construct
  REGION 1..10: note = short peptide
RLKNEGATVK

SEQ ID NO: 4789 - protein, 14 aa, synthetic construct
  REGION 1..14: note = short peptide
PTANQWDYKNIIEK

SEQ ID NO: 4790 - protein, 13 aa, synthetic construct
  REGION 1..13: note = short peptide
SLVIPEKFQHILR

SEQ ID NO: 4791 - protein, 10 aa, synthetic construct
  REGION 1..10: note = short peptide
NAGSEHSGRY

SEQ ID NO: 4792 - protein, 10 aa, synthetic construct
  REGION 1..10: note = short peptide
SADDGIRNLY

SEQ ID NO: 4793 - protein, 9 aa, synthetic construct
  REGION 1..9: note = short peptide
RGKSCLFRL

SEQ ID NO: 4794 - protein, 9 aa, synthetic construct
  REGION 1..9: note = short peptide
QGGLVCRAL

SEQ ID NO: 4795 - protein, 9 aa, synthetic construct
  REGION 1..9: note = short peptide
QGGLVCRAL

SEQ ID NO: 4796 - protein, 10 aa, synthetic construct
  REGION 1..10: note = short peptide
RCHDKLLRKT

SEQ ID NO: 4797 - protein, 9 aa, synthetic construct
  REGION 1..9: note = short peptide
TKSVAVNPK

SEQ ID NO: 4798 - protein, 9 aa, synthetic construct
  REGION 1..9: note = short peptide
THCPSNNVI

SEQ ID NO: 4799 - protein, 11 aa, synthetic construct
  REGION 1..11: note = short peptide
TLRNYTVINSK

SEQ ID NO: 4800 - protein, 9 aa, synthetic construct
  REGION 1..9: note = short peptide
LPWQGLKAA

SEQ ID NO: 4801 - protein, 10 aa, synthetic construct
  REGION 1..10: note = short peptide
TPIEGKNMSF

SEQ ID NO: 4802 - protein, 11 aa, synthetic construct
  REGION 1..11: note = short peptide
TNAASVSRSGA

SEQ ID NO: 4803 - protein, 8 aa, synthetic construct
  REGION 1..8: note = short peptide
SSNLTNAI

SEQ ID NO: 4804 - protein, 10 aa, synthetic construct
  REGION 1..10: note = short peptide
HHCEHLLERL

SEQ ID NO: 4805 - protein, 9 aa, synthetic construct
  REGION 1..9: note = short peptide
HPPSHWPLI

SEQ ID NO: 4806 - protein, 9 aa, synthetic construct
  REGION 1..9: note = short peptide
HPPSHWPLI

SEQ ID NO: 4807 - protein, 8 aa, synthetic construct
  REGION 1..8: note = short peptide
GGGRPHPR

SEQ ID NO: 4808 - protein, 11 aa, synthetic construct
  REGION 1..11: note = short peptide
GPRGWLVLCVL

SEQ ID NO: 4809 - protein, 13 aa, synthetic construct
  REGION 1..13: note = short peptide
KNIEVTMYVLYAD

SEQ ID NO: 4810 - protein, 15 aa, synthetic construct
  REGION 1..15: note = short peptide
IQIINKDDSNWWQGR

SEQ ID NO: 4811 - protein, 8 aa, synthetic construct
  REGION 1..8: note = short peptide
IHPPRVKL

SEQ ID NO: 4812 - protein, 8 aa, synthetic construct
  REGION 1..8: note = short peptide
KFFNYINL

SEQ ID NO: 4813 - protein, 10 aa, synthetic construct
  REGION 1..10: note = short peptide
KDNGAIEFTF

SEQ ID NO: 4814 - protein, 10 aa, synthetic construct
  REGION 1..10: note = short peptide
APRWGNPRAL

SEQ ID NO: 4815 - protein, 8 aa, synthetic construct
  REGION 1..8: note = short peptide
AQALERTL

SEQ ID NO: 4816 - protein, 9 aa, synthetic construct
  REGION 1..9: note = short peptide
APVNVGRGS

SEQ ID NO: 4817 - protein, 10 aa, synthetic construct
  REGION 1..10: note = short peptide
ALLPWPFRNK

SEQ ID NO: 4818 - protein, 13 aa, synthetic construct
  REGION 1..13: note = short peptide
FTDGITNKLVACY

SEQ ID NO: 4819 - protein, 10 aa, synthetic construct
  REGION 1..10: note = short peptide
AVNPRDPPSW

SEQ ID NO: 4820 - protein, 11 aa, synthetic construct
  REGION 1..11: note = short peptide
ESIGNCPFSQR

SEQ ID NO: 4821 - protein, 8 aa, synthetic construct
  REGION 1..8: note = short peptide
CGGGGRVY

SEQ ID NO: 4822 - protein, 8 aa, synthetic construct
  REGION 1..8: note = short peptide
FLNHGLSL

SEQ ID NO: 4823 - protein, 10 aa, synthetic construct
  REGION 1..10: note = short peptide
CLDPAQRSLY

SEQ ID NO: 4824 - protein, 10 aa, synthetic construct
  REGION 1..10: note = short peptide
CLDPAQRSLY

SEQ ID NO: 4825 - protein, 11 aa, synthetic construct
  REGION 1..11: note = short peptide
EAIPDEVIKKW

SEQ ID NO: 4826 - protein, 15 aa, synthetic construct
  REGION 1..15: note = short peptide
KPGPPGPPGIPFNER

SEQ ID NO: 4827 - protein, 9 aa, synthetic construct
  REGION 1..9: note = short peptide
YSCELPLCY

SEQ ID NO: 4828 - protein, 9 aa, synthetic construct
  REGION 1..9: note = short peptide
YSCELPLCY

SEQ ID NO: 4829 - protein, 10 aa, synthetic construct
  REGION 1..10: note = short peptide
NASLAQQLCR

SEQ ID NO: 4830 - protein, 10 aa, synthetic construct
  REGION 1..10: note = short peptide
NASLAQQLCR

SEQ ID NO: 4831 - protein, 9 aa, synthetic construct
  REGION 1..9: note = short peptide
NPNNITCVL

SEQ ID NO: 4832 - protein, 9 aa, synthetic construct
  REGION 1..9: note = short peptide
NPNNITCVL

SEQ ID NO: 4833 - protein, 8 aa, synthetic construct
  REGION 1..8: note = short peptide
HHNCSESL

SEQ ID NO: 4834 - protein, 8 aa, synthetic construct
  REGION 1..8: note = short peptide
HHNCSESL

SEQ ID NO: 4835 - protein, 9 aa, synthetic construct
  REGION 1..9: note = short peptide
DTICGVGNM

SEQ ID NO: 4836 - protein, 9 aa, synthetic construct
  REGION 1..9: note = short peptide
DTICGVGNM

SEQ ID NO: 4837 - protein, 9 aa, synthetic construct
  REGION 1..9: note = short peptide
AVKEKGSTL

SEQ ID NO: 4838 - protein, 9 aa, synthetic construct
  REGION 1..9: note = short peptide
HDFLKYDFF

SEQ ID NO: 4839 - protein, 9 aa, synthetic construct
  REGION 1..9: note = short peptide
RPKENVTIM

SEQ ID NO: 4840 - protein, 9 aa, synthetic construct
  REGION 1..9: note = short peptide
TLCGDIQLM

SEQ ID NO: 4841 - protein, 10 aa, synthetic construct
  REGION 1..10: note = short peptide
KPQRPPPPGR

SEQ ID NO: 4842 - protein, 10 aa, synthetic construct
  REGION 1..10: note = short peptide
AVGKPHGIAI

SEQ ID NO: 4843 - protein, 9 aa, synthetic construct
  REGION 1..9: note = short peptide
HPRLPMAQF

SEQ ID NO: 4844 - protein, 10 aa, synthetic construct
  REGION 1..10: note = short peptide
TKSINSANKF

SEQ ID NO: 4845 - protein, 13 aa, synthetic construct
  REGION 1..13: note = short peptide
HAGEYGAEALERM

SEQ ID NO: 4846 - protein, 9 aa, synthetic construct
  REGION 1..9: note = short peptide
RPTSARQAM

SEQ ID NO: 4847 - protein, 9 aa, synthetic construct
  REGION 1..9: note = short peptide
TIYNVTTGK

SEQ ID NO: 4848 - protein, 9 aa, synthetic construct
  REGION 1..9: note = short peptide
GTYQPLSTR

SEQ ID NO: 4849 - protein, 14 aa, synthetic construct
  REGION 1..14: note = short peptide
TKDTVCSGVTGAVN

SEQ ID NO: 4850 - protein, 9 aa, synthetic construct
  REGION 1..9: note = short peptide
GVAGNPMVK

SEQ ID NO: 4851 - protein, 11 aa, synthetic construct
  REGION 1..11: note = short peptide
AVYGQKEIHRK

SEQ ID NO: 4852 - protein, 11 aa, synthetic construct
  REGION 1..11: note = short peptide
GVEAKQPNSAI

SEQ ID NO: 4853 - protein, 9 aa, synthetic construct
  REGION 1..9: note = short peptide
AVQKAIPMY

SEQ ID NO: 4854 - protein, 9 aa, synthetic construct
  REGION 1..9: note = short peptide
GVSGIFMKY

SEQ ID NO: 4855 - protein, 9 aa, synthetic construct
  REGION 1..9: note = short peptide
KYMTAVVKL

SEQ ID NO: 4856 - protein, 9 aa, synthetic construct
  REGION 1..9: note = short peptide
TLLNGQLPL

SEQ ID NO: 4857 - protein, 9 aa, synthetic construct
  REGION 1..9: note = short peptide
RPDAEKKEM

SEQ ID NO: 4858 - protein, 10 aa, synthetic construct
  REGION 1..10: note = short peptide
RMKKEASVKF

SEQ ID NO: 4859 - protein, 10 aa, synthetic construct
  REGION 1..10: note = short peptide
HFSRPVGPMG

SEQ ID NO: 4860 - protein, 10 aa, synthetic construct
  REGION 1..10: note = short peptide
TLTKYQVTVP

SEQ ID NO: 4861 - protein, 9 aa, synthetic construct
  REGION 1..9: note = short peptide
RLYPTPRVR

SEQ ID NO: 4862 - protein, 9 aa, synthetic construct
  REGION 1..9: note = short peptide
RLTDLCTKI

SEQ ID NO: 4863 - protein, 10 aa, synthetic construct
  REGION 1..10: note = short peptide
ATPMPQGNGP

SEQ ID NO: 4864 - protein, 10 aa, synthetic construct
  REGION 1..10: note = short peptide
RLPPGNLSAL

SEQ ID NO: 4865 - protein, 9 aa, synthetic construct
  REGION 1..9: note = short peptide
HGYDKDPVL

SEQ ID NO: 4866 - protein, 9 aa, synthetic construct
  REGION 1..9: note = short peptide
RLNHYVLYK

SEQ ID NO: 4867 - protein, 9 aa, synthetic construct
  REGION 1..9: note = short peptide
RLLNINPNK

SEQ ID NO: 4868 - protein, 8 aa, synthetic construct
  REGION 1..8: note = short peptide
KYRKVLQL

SEQ ID NO: 4869 - protein, 11 aa, synthetic construct
  REGION 1..11: note = short peptide
RMKKEDNIQAK

SEQ ID NO: 4870 - protein, 10 aa, synthetic construct
  REGION 1..10: note = short peptide
RNSDPNDPNR

SEQ ID NO: 4871 - protein, 10 aa, synthetic construct
  REGION 1..10: note = short peptide
HEIESLYTKL

SEQ ID NO: 4872 - protein, 13 aa, synthetic construct
  REGION 1..13: note = short peptide
HEIPVKKGEGAEL

SEQ ID NO: 4873 - protein, 14 aa, synthetic construct
  REGION 1..14: note = short peptide
RPAETNLRHTCKRI

SEQ ID NO: 4874 - protein, 9 aa, synthetic construct
  REGION 1..9: note = short peptide
HENQTKPSI

SEQ ID NO: 4875 - protein, 9 aa, synthetic construct
  REGION 1..9: note = short peptide
RPVNVPIDI

SEQ ID NO: 4876 - protein, 11 aa, synthetic construct
  REGION 1..11: note = short peptide
KTSSTGKESPK

SEQ ID NO: 4877 - protein, 11 aa, synthetic construct
  REGION 1..11: note = short peptide
RMKSLEQDALR

SEQ ID NO: 4878 - protein, 10 aa, synthetic construct
  REGION 1..10: note = short peptide
TLRKDVTALK

SEQ ID NO: 4879 - protein, 14 aa, synthetic construct
  REGION 1..14: note = short peptide
HFDLSHGSAQVKGH

SEQ ID NO: 4880 - protein, 8 aa, synthetic construct
  REGION 1..8: note = short peptide
RNFSSPLL

SEQ ID NO: 4881 - protein, 8 aa, synthetic construct
  REGION 1..8: note = short peptide
RNFSSPIL

SEQ ID NO: 4882 - protein, 10 aa, synthetic construct
  REGION 1..10: note = short peptide
TLSIKKLSPI

SEQ ID NO: 4883 - protein, 13 aa, synthetic construct
  REGION 1..13: note = short peptide
RMKTGNKIRYNSK

SEQ ID NO: 4884 - protein, 10 aa, synthetic construct
  REGION 1..10: note = short peptide
ATVQQLEGRW

SEQ ID NO: 4885 - protein, 10 aa, synthetic construct
  REGION 1..10: note = short peptide
RPVGPMGVNA

SEQ ID NO: 4886 - protein, 9 aa, synthetic construct
  REGION 1..9: note = short peptide
RPVNVPLDI

SEQ ID NO: 4887 - protein, 9 aa, synthetic construct
  REGION 1..9: note = short peptide
KYITDVVKL

SEQ ID NO: 4888 - protein, 9 aa, synthetic construct
  REGION 1..9: note = short peptide
TGKIVSSIF

SEQ ID NO: 4889 - protein, 9 aa, synthetic construct
  REGION 1..9: note = short peptide
TGKQLALLK

SEQ ID NO: 4890 - protein, 10 aa, synthetic construct
  REGION 1..10: note = short peptide
RSMPEQTGEK

SEQ ID NO: 4891 - protein, 11 aa, synthetic construct
  REGION 1..11: note = short peptide
KSAPAPKKGSK

SEQ ID NO: 4892 - protein, 8 aa, synthetic construct
  REGION 1..8: note = short peptide
CLLSGAPM

SEQ ID NO: 4893 - protein, 10 aa, synthetic construct
  REGION 1..10: note = short peptide
GQRKGAGSVF

SEQ ID NO: 4894 - protein, 9 aa, synthetic construct
  REGION 1..9: note = short peptide
TGNGTRLVV

SEQ ID NO: 4895 - protein, 10 aa, synthetic construct
  REGION 1..10: note = short peptide
GRGAQLFAKR

SEQ ID NO: 4896 - protein, 9 aa, synthetic construct
  REGION 1..9: note = short peptide
TGNPTVIKM

SEQ ID NO: 4897 - protein, 10 aa, synthetic construct
  REGION 1..10: note = short peptide
RSGEGFLCVF

SEQ ID NO: 4898 - protein, 11 aa, synthetic construct
  REGION 1..11: note = short peptide
TFRPAAMLVER

SEQ ID NO: 4899 - protein, 10 aa, synthetic construct
  REGION 1..10: note = short peptide
DAMRLGAEVY

SEQ ID NO: 4900 - protein, 11 aa, synthetic construct
  REGION 1..11: note = short peptide
GPRKLKTGGNF

SEQ ID NO: 4901 - protein, 9 aa, synthetic construct
  REGION 1..9: note = short peptide
RTGPPMGSR

SEQ ID NO: 4902 - protein, 9 aa, synthetic construct
  REGION 1..9: note = short peptide
TGGKAPRKQ

SEQ ID NO: 4903 - protein, 9 aa, synthetic construct
  REGION 1..9: note = short peptide
DADPHGIEI

SEQ ID NO: 4904 - protein, 9 aa, synthetic construct
  REGION 1..9: note = short peptide
TGGLQPPVQ

SEQ ID NO: 4905 - protein, 9 aa, synthetic construct
  REGION 1..9: note = short peptide
GRNNGKKLM

SEQ ID NO: 4906 - protein, 11 aa, synthetic construct
  REGION 1..11: note = short peptide
GRPGPPGPSGP

SEQ ID NO: 4907 - protein, 9 aa, synthetic construct
  REGION 1..9: note = short peptide
RPWKKHSTF

SEQ ID NO: 4908 - protein, 9 aa, synthetic construct
  REGION 1..9: note = short peptide
KPRDLFIAK

SEQ ID NO: 4909 - protein, 9 aa, synthetic construct
  REGION 1..9: note = short peptide
THPSIVDCV

SEQ ID NO: 4910 - protein, 10 aa, synthetic construct
  REGION 1..10: note = short peptide
RQYDKFLTHF

SEQ ID NO: 4911 - protein, 10 aa, synthetic construct
  REGION 1..10: note = short peptide
CCTRQGEARF

SEQ ID NO: 4912 - protein, 9 aa, synthetic construct
  REGION 1..9: note = short peptide
RQPRGRPHR

SEQ ID NO: 4913 - protein, 12 aa, synthetic construct
  REGION 1..12: note = short peptide
GTEFPNPLISKY

SEQ ID NO: 4914 - protein, 9 aa, synthetic construct
  REGION 1..9: note = short peptide
RQKTPGTPK

SEQ ID NO: 4915 - protein, 9 aa, synthetic construct
  REGION 1..9: note = short peptide
CAAAGAGAF

SEQ ID NO: 4916 - protein, 9 aa, synthetic construct
  REGION 1..9: note = short peptide
RQIPYTMMK

SEQ ID NO: 4917 - protein, 10 aa, synthetic construct
  REGION 1..10: note = short peptide
THVTKSLHSI

SEQ ID NO: 4918 - protein, 9 aa, synthetic construct
  REGION 1..9: note = short peptide
TIDMLQIEF

SEQ ID NO: 4919 - protein, 15 aa, synthetic construct
  REGION 1..15: note = short peptide
AYKAIPVAQDLNAPS

SEQ ID NO: 4920 - protein, 12 aa, synthetic construct
  REGION 1..12: note = short peptide
GTISRGELPGTK

SEQ ID NO: 4921 - protein, 9 aa, synthetic construct
  REGION 1..9: note = short peptide
RRGGAINSR

SEQ ID NO: 4922 - protein, 9 aa, synthetic construct
  REGION 1..9: note = short peptide
RRKHLAYLI

SEQ ID NO: 4923 - protein, 11 aa, synthetic construct
  REGION 1..11: note = short peptide
RSDRGGGRSRY

SEQ ID NO: 4924 - protein, 8 aa, synthetic construct
  REGION 1..8: note = short peptide
RRKILTQR

SEQ ID NO: 4925 - protein, 8 aa, synthetic construct
  REGION 1..8: note = short peptide
TGQLKVLM

SEQ ID NO: 4926 - protein, 8 aa, synthetic construct
  REGION 1..8: note = short peptide
TGSDIFNK

SEQ ID NO: 4927 - protein, 8 aa, synthetic construct
  REGION 1..8: note = short peptide
CILHYLSL

SEQ ID NO: 4928 - protein, 9 aa, synthetic construct
  REGION 1..9: note = short peptide
GSDRGGFNK

SEQ ID NO: 4929 - protein, 9 aa, synthetic construct
  REGION 1..9: note = short peptide
CGPEHSTEL

SEQ ID NO: 4930 - protein, 9 aa, synthetic construct
  REGION 1..9: note = short peptide
RRSLPGKAI

SEQ ID NO: 4931 - protein, 9 aa, synthetic construct
  REGION 1..9: note = short peptide
RRRIVQPMI

SEQ ID NO: 4932 - protein, 9 aa, synthetic construct
  REGION 1..9: note = short peptide
RRQSVGRGL

SEQ ID NO: 4933 - protein, 9 aa, synthetic construct
  REGION 1..9: note = short peptide
THEDAVAAM

SEQ ID NO: 4934 - protein, 13 aa, synthetic construct
  REGION 1..13: note = short peptide
RRNSSSPVSPASV

SEQ ID NO: 4935 - protein, 10 aa, synthetic construct
  REGION 1..10: note = short peptide
RLKVKGDLAM

SEQ ID NO: 4936 - protein, 10 aa, synthetic construct
  REGION 1..10: note = short peptide
RLKVKGDLAM

SEQ ID NO: 4937 - protein, 11 aa, synthetic construct
  REGION 1..11: note = short peptide
ARGKGDLALQR

SEQ ID NO: 4938 - protein, 11 aa, synthetic construct
  REGION 1..11: note = short peptide
TSKPLVTSVAN

SEQ ID NO: 4939 - protein, 10 aa, synthetic construct
  REGION 1..10: note = short peptide
ASDPNSSIFL

SEQ ID NO: 4940 - protein, 10 aa, synthetic construct
  REGION 1..10: note = short peptide
HSQNPRFYHK

SEQ ID NO: 4941 - protein, 14 aa, synthetic construct
  REGION 1..14: note = short peptide
QSSGSVGSSGISSI

SEQ ID NO: 4942 - protein, 10 aa, synthetic construct
  REGION 1..10: note = short peptide
QSRASSPQSL

SEQ ID NO: 4943 - protein, 14 aa, synthetic construct
  REGION 1..14: note = short peptide
ASASGAMAKHEQIL

SEQ ID NO: 4944 - protein, 14 aa, synthetic construct
  REGION 1..14: note = short peptide
ASASGAMAKHEQIL

SEQ ID NO: 4945 - protein, 8 aa, synthetic construct
  REGION 1..8: note = short peptide
KPLPQPVF

SEQ ID NO: 4946 - protein, 11 aa, synthetic construct
  REGION 1..11: note = short peptide
ASADELTFHEF

SEQ ID NO: 4947 - protein, 13 aa, synthetic construct
  REGION 1..13: note = short peptide
TSYNRGDSTFESK

SEQ ID NO: 4948 - protein, 8 aa, synthetic construct
  REGION 1..8: note = short peptide
QSAPTPAW

SEQ ID NO: 4949 - protein, 11 aa, synthetic construct
  REGION 1..11: note = short peptide
QRWDGKETTIK

SEQ ID NO: 4950 - protein, 9 aa, synthetic construct
  REGION 1..9: note = short peptide
HTIAPMGTR

SEQ ID NO: 4951 - protein, 11 aa, synthetic construct
  REGION 1..11: note = short peptide
ARKSTGGKAPR

SEQ ID NO: 4952 - protein, 9 aa, synthetic construct
  REGION 1..9: note = short peptide
QRLIGNESF

SEQ ID NO: 4953 - protein, 10 aa, synthetic construct
  REGION 1..10: note = short peptide
ASEIHMTGPM

SEQ ID NO: 4954 - protein, 9 aa, synthetic construct
  REGION 1..9: note = short peptide
TRVPMEVVL

SEQ ID NO: 4955 - protein, 8 aa, synthetic construct
  REGION 1..8: note = short peptide
TRSSAVRL

SEQ ID NO: 4956 - protein, 10 aa, synthetic construct
  REGION 1..10: note = short peptide
HRDTSMVHEL

SEQ ID NO: 4957 - protein, 8 aa, synthetic construct
  REGION 1..8: note = short peptide
TRSSAVRL

SEQ ID NO: 4958 - protein, 10 aa, synthetic construct
  REGION 1..10: note = short peptide
RALGAIQRQV

SEQ ID NO: 4959 - protein, 11 aa, synthetic construct
  REGION 1..11: note = short peptide
RAKYPDRVPVI

SEQ ID NO: 4960 - protein, 9 aa, synthetic construct
  REGION 1..9: note = short peptide
RAILGSVER

SEQ ID NO: 4961 - protein, 9 aa, synthetic construct
  REGION 1..9: note = short peptide
HSDDYIKFL

SEQ ID NO: 4962 - protein, 13 aa, synthetic construct
  REGION 1..13: note = short peptide
HSDKINKSESVVY

SEQ ID NO: 4963 - protein, 10 aa, synthetic construct
  REGION 1..10: note = short peptide
KPLVAKISSY

SEQ ID NO: 4964 - protein, 9 aa, synthetic construct
  REGION 1..9: note = short peptide
QVSRDLPVM

SEQ ID NO: 4965 - protein, 11 aa, synthetic construct
  REGION 1..11: note = short peptide
ARKGSLKNGSM

SEQ ID NO: 4966 - protein, 8 aa, synthetic construct
  REGION 1..8: note = short peptide
HTNTSHVM

SEQ ID NO: 4967 - protein, 8 aa, synthetic construct
  REGION 1..8: note = short peptide
HGYVKQSL

SEQ ID NO: 4968 - protein, 10 aa, synthetic construct
  REGION 1..10: note = short peptide
QQISRHQEQF

SEQ ID NO: 4969 - protein, 13 aa, synthetic construct
  REGION 1..13: note = short peptide
LASVSTVLTSKYR

SEQ ID NO: 4970 - protein, 12 aa, synthetic construct
  REGION 1..12: note = short peptide
QGPKQASGAAAA

SEQ ID NO: 4971 - protein, 15 aa, synthetic construct
  REGION 1..15: note = short peptide
IEHIKHSKSRDSFLK

SEQ ID NO: 4972 - protein, 10 aa, synthetic construct
  REGION 1..10: note = short peptide
IEVDGKQVEL

SEQ ID NO: 4973 - protein, 12 aa, synthetic construct
  REGION 1..12: note = short peptide
QGGAGLPAQAAL

SEQ ID NO: 4974 - protein, 10 aa, synthetic construct
  REGION 1..10: note = short peptide
TTSSVKSPSM

SEQ ID NO: 4975 - protein, 8 aa, synthetic construct
  REGION 1..8: note = short peptide
QASQVLVR

SEQ ID NO: 4976 - protein, 13 aa, synthetic construct
  REGION 1..13: note = short peptide
IGGTETTANTLSW

SEQ ID NO: 4977 - protein, 11 aa, synthetic construct
  REGION 1..11: note = short peptide
LAVNGRTELLH

SEQ ID NO: 4978 - protein, 8 aa, synthetic construct
  REGION 1..8: note = short peptide
QAEPLPRL

SEQ ID NO: 4979 - protein, 9 aa, synthetic construct
  REGION 1..9: note = short peptide
TVCEDVFQV

SEQ ID NO: 4980 - protein, 10 aa, synthetic construct
  REGION 1..10: note = short peptide
QAAAFNVTFR

SEQ ID NO: 4981 - protein, 10 aa, synthetic construct
  REGION 1..10: note = short peptide
TTDCLQLLAY

SEQ ID NO: 4982 - protein, 9 aa, synthetic construct
  REGION 1..9: note = short peptide
HVAAPYIAK

SEQ ID NO: 4983 - protein, 9 aa, synthetic construct
  REGION 1..9: note = short peptide
HVKNATMGY

SEQ ID NO: 4984 - protein, 15 aa, synthetic construct
  REGION 1..15: note = short peptide
HVPGGGNVKIDSQKL

SEQ ID NO: 4985 - protein, 9 aa, synthetic construct
  REGION 1..9: note = short peptide
HVVRPMSHY

SEQ ID NO: 4986 - protein, 10 aa, synthetic construct
  REGION 1..10: note = short peptide
HVYDGKFLAR

SEQ ID NO: 4987 - protein, 8 aa, synthetic construct
  REGION 1..8: note = short peptide
KPKMVKVL

SEQ ID NO: 4988 - protein, 9 aa, synthetic construct
  REGION 1..9: note = short peptide
TTKVSYQAY

SEQ ID NO: 4989 - protein, 10 aa, synthetic construct
  REGION 1..10: note = short peptide
AQNPANMSKY

SEQ ID NO: 4990 - protein, 10 aa, synthetic construct
  REGION 1..10: note = short peptide
QMDGPLPLHY

SEQ ID NO: 4991 - protein, 9 aa, synthetic construct
  REGION 1..9: note = short peptide
QLSRADLVL

SEQ ID NO: 4992 - protein, 12 aa, synthetic construct
  REGION 1..12: note = short peptide
QLCNIPCSTDCI

SEQ ID NO: 4993 - protein, 9 aa, synthetic construct
  REGION 1..9: note = short peptide
IARQAVAAL

SEQ ID NO: 4994 - protein, 10 aa, synthetic construct
  REGION 1..10: note = short peptide
RASNITMILK

SEQ ID NO: 4995 - protein, 9 aa, synthetic construct
  REGION 1..9: note = short peptide
TRNLTLMSI

SEQ ID NO: 4996 - protein, 8 aa, synthetic construct
  REGION 1..8: note = short peptide
HQILKNPN

SEQ ID NO: 4997 - protein, 12 aa, synthetic construct
  REGION 1..12: note = short peptide
ATDELATKLSRR

SEQ ID NO: 4998 - protein, 11 aa, synthetic construct
  REGION 1..11: note = short peptide
RISKDLANICK

SEQ ID NO: 4999 - protein, 9 aa, synthetic construct
  REGION 1..9: note = short peptide
RISGIQKTY

SEQ ID NO: 5000 - protein, 10 aa, synthetic construct
  REGION 1..10: note = short peptide
RIPLLSDLTH

SEQ ID NO: 5001 - protein, 9 aa, synthetic construct
  REGION 1..9: note = short peptide
ATDELATKL

SEQ ID NO: 5002 - protein, 10 aa, synthetic construct
  REGION 1..10: note = short peptide
HIISGTCASW

SEQ ID NO: 5003 - protein, 11 aa, synthetic construct
  REGION 1..11: note = short peptide
RILPQDVILKF

SEQ ID NO: 5004 - protein, 14 aa, synthetic construct
  REGION 1..14: note = short peptide
HIYDTKLGTDKCDN

SEQ ID NO: 5005 - protein, 15 aa, synthetic construct
  REGION 1..15: note = short peptide
HKPGGGDVKIESQKL

SEQ ID NO: 5006 - protein, 12 aa, synthetic construct
  REGION 1..12: note = short peptide
RIHNVTASDSGK

SEQ ID NO: 5007 - protein, 10 aa, synthetic construct
  REGION 1..10: note = short peptide
TPDLWKETVF

SEQ ID NO: 5008 - protein, 13 aa, synthetic construct
  REGION 1..13: note = short peptide
HLALSVAGGFVAL

SEQ ID NO: 5009 - protein, 11 aa, synthetic construct
  REGION 1..11: note = short peptide
ATAGKDDCLLK

SEQ ID NO: 5010 - protein, 12 aa, synthetic construct
  REGION 1..12: note = short peptide
ATAGDGLIELRK

SEQ ID NO: 5011 - protein, 12 aa, synthetic construct
  REGION 1..12: note = short peptide
ASVSTVLTSKYR

SEQ ID NO: 5012 - protein, 11 aa, synthetic construct
  REGION 1..11: note = short peptide
ASVSTVLTSKY

SEQ ID NO: 5013 - protein, 10 aa, synthetic construct
  REGION 1..10: note = short peptide
KSAPSTGGVK

SEQ ID NO: 5014 - protein, 10 aa, synthetic construct
  REGION 1..10: note = short peptide
TNVKAAWGKV

SEQ ID NO: 5015 - protein, 13 aa, synthetic construct
  REGION 1..13: note = short peptide
ATLKEKLIAPVAE

SEQ ID NO: 5016 - protein, 9 aa, synthetic construct
  REGION 1..9: note = short peptide
HHGPMAVAF

SEQ ID NO: 5017 - protein, 10 aa, synthetic construct
  REGION 1..10: note = short peptide
RKGTDDSMTL

SEQ ID NO: 5018 - protein, 9 aa, synthetic construct
  REGION 1..9: note = short peptide
RKYQKSTQL

SEQ ID NO: 5019 - protein, 9 aa, synthetic construct
  REGION 1..9: note = short peptide
TNGPIDVYL

SEQ ID NO: 5020 - protein, 10 aa, synthetic construct
  REGION 1..10: note = short peptide
HHSTPTKGGW

SEQ ID NO: 5021 - protein, 10 aa, synthetic construct
  REGION 1..10: note = short peptide
TNLAYLKEKN

SEQ ID NO: 5022 - protein, 14 aa, synthetic construct
  REGION 1..14: note = short peptide
TNTKESSSHHPGIA

SEQ ID NO: 5023 - protein, 9 aa, synthetic construct
  REGION 1..9: note = short peptide
ASSSIAAKM

SEQ ID NO: 5024 - protein, 15 aa, synthetic construct
  REGION 1..15: note = short peptide
TPKTPKGPSSVEDIK

SEQ ID NO: 5025 - protein, 10 aa, synthetic construct
  REGION 1..10: note = short peptide
HPRRGAPGSA

SEQ ID NO: 5026 - protein, 11 aa, synthetic construct
  REGION 1..11: note = short peptide
REKVNATEEML

SEQ ID NO: 5027 - protein, 8 aa, synthetic construct
  REGION 1..8: note = short peptide
HPKYKTEL

SEQ ID NO: 5028 - protein, 10 aa, synthetic construct
  REGION 1..10: note = short peptide
KTQAANIKSM

SEQ ID NO: 5029 - protein, 9 aa, synthetic construct
  REGION 1..9: note = short peptide
TQNSTNVQM

SEQ ID NO: 5030 - protein, 8 aa, synthetic construct
  REGION 1..8: note = short peptide
SRAGMPRQ

SEQ ID NO: 5031 - protein, 9 aa, synthetic construct
  REGION 1..9: note = short peptide
RESSGKYTF

SEQ ID NO: 5032 - protein, 9 aa, synthetic construct
  REGION 1..9: note = short peptide
RDQVLKVCA

SEQ ID NO: 5033 - protein, 11 aa, synthetic construct
  REGION 1..11: note = short peptide
RDQQRNQTNTF

SEQ ID NO: 5034 - protein, 9 aa, synthetic construct
  REGION 1..9: note = short peptide
RDAERVKEM

SEQ ID NO: 5035 - protein, 9 aa, synthetic construct
  REGION 1..9: note = short peptide
TRDPLVIEL

SEQ ID NO: 5036 - protein, 9 aa, synthetic construct
  REGION 1..9: note = short peptide
TPLEDCVIS

SEQ ID NO: 5037 - protein, 11 aa, synthetic construct
  REGION 1..11: note = short peptide
HLQEEPPMPTT

SEQ ID NO: 5038 - protein, 9 aa, synthetic construct
  REGION 1..9: note = short peptide
RGPPGPPGF

SEQ ID NO: 5039 - protein, 12 aa, synthetic construct
  REGION 1..12: note = short peptide
HLYDPKMQTDKP

SEQ ID NO: 5040 - protein, 8 aa, synthetic construct
  REGION 1..8: note = short peptide
RGGNQYLR

SEQ ID NO: 5041 - protein, 14 aa, synthetic construct
  REGION 1..14: note = short peptide
HLYDPKMQTDKPFD

SEQ ID NO: 5042 - protein, 10 aa, synthetic construct
  REGION 1..10: note = short peptide
TPQGRGTVAA

SEQ ID NO: 5043 - protein, 8 aa, synthetic construct
  REGION 1..8: note = short peptide
HNSTMYVF

SEQ ID NO: 5044 - protein, 8 aa, synthetic construct
  REGION 1..8: note = short peptide
HNSTTSTF

SEQ ID NO: 5045 - protein, 9 aa, synthetic construct
  REGION 1..9: note = short peptide
ASSKDAIKK

SEQ ID NO: 5046 - protein, 10 aa, synthetic construct
  REGION 1..10: note = short peptide
RGGAESHTFK

SEQ ID NO: 5047 - protein, 9 aa, synthetic construct
  REGION 1..9: note = short peptide
HPGIAEFPS

SEQ ID NO: 5048 - protein, 8 aa, synthetic construct
  REGION 1..8: note = short peptide
TPRSNSTP

SEQ ID NO: 5049 - protein, 8 aa, synthetic construct
  REGION 1..8: note = short peptide
RFRRACRL

SEQ ID NO: 5050 - protein, 9 aa, synthetic construct
  REGION 1..9: note = short peptide
RFNISGCRL

SEQ ID NO: 5051 - protein, 11 aa, synthetic construct
  REGION 1..11: note = short peptide
REYQELLNVKM

SEQ ID NO: 5052 - protein, 11 aa, synthetic construct
  REGION 1..11: note = short peptide
REYQDLLNVKM

SEQ ID NO: 5053 - protein, 11 aa, synthetic construct
  REGION 1..11: note = short peptide
REVTSGVSPRG

SEQ ID NO: 5054 - protein, 10 aa, synthetic construct
  REGION 1..10: note = short peptide
SLCLSLCLCL

SEQ ID NO: 5055 - protein, 14 aa, synthetic construct
  REGION 1..14: note = short peptide
STHQAAIVSKIDSR

SEQ ID NO: 5056 - protein, 12 aa, synthetic construct
  REGION 1..12: note = short peptide
SLKDEVLKIMPV

SEQ ID NO: 5057 - protein, 9 aa, synthetic construct
  REGION 1..9: note = short peptide
DVIIVLDQK

SEQ ID NO: 5058 - protein, 9 aa, synthetic construct
  REGION 1..9: note = short peptide
DVIGDEICC

SEQ ID NO: 5059 - protein, 10 aa, synthetic construct
  REGION 1..10: note = short peptide
KQTARKATAW

SEQ ID NO: 5060 - protein, 9 aa, synthetic construct
  REGION 1..9: note = short peptide
DVIERVIQY

SEQ ID NO: 5061 - protein, 14 aa, synthetic construct
  REGION 1..14: note = short peptide
STGGKAPRKQLATK

SEQ ID NO: 5062 - protein, 12 aa, synthetic construct
  REGION 1..12: note = short peptide
SLASQSASISGV

SEQ ID NO: 5063 - protein, 10 aa, synthetic construct
  REGION 1..10: note = short peptide
SLAGVGDVSF

SEQ ID NO: 5064 - protein, 10 aa, synthetic construct
  REGION 1..10: note = short peptide
FKCDDAVITK

SEQ ID NO: 5065 - protein, 10 aa, synthetic construct
  REGION 1..10: note = short peptide
FKHIAKPGWK

SEQ ID NO: 5066 - protein, 9 aa, synthetic construct
  REGION 1..9: note = short peptide
SKSPDPYRL

SEQ ID NO: 5067 - protein, 12 aa, synthetic construct
  REGION 1..12: note = short peptide
KVKKPATAAGTK

SEQ ID NO: 5068 - protein, 10 aa, synthetic construct
  REGION 1..10: note = short peptide
KVVEGSFVYK

SEQ ID NO: 5069 - protein, 13 aa, synthetic construct
  REGION 1..13: note = short peptide
FKYNRRPAETNLR

SEQ ID NO: 5070 - protein, 12 aa, synthetic construct
  REGION 1..12: note = short peptide
SKPHSEAGTAFI

SEQ ID NO: 5071 - protein, 8 aa, synthetic construct
  REGION 1..8: note = short peptide
KVPAGVSL

SEQ ID NO: 5072 - protein, 9 aa, synthetic construct
  REGION 1..9: note = short peptide
DVVFLITKY

SEQ ID NO: 5073 - protein, 11 aa, synthetic construct
  REGION 1..11: note = short peptide
EVIPYTPAMQR

SEQ ID NO: 5074 - protein, 11 aa, synthetic construct
  REGION 1..11: note = short peptide
SLSPPGSPLVL

SEQ ID NO: 5075 - protein, 9 aa, synthetic construct
  REGION 1..9: note = short peptide
SSYSRNHTY

SEQ ID NO: 5076 - protein, 9 aa, synthetic construct
  REGION 1..9: note = short peptide
SLNSKLLSL

SEQ ID NO: 5077 - protein, 9 aa, synthetic construct
  REGION 1..9: note = short peptide
DVKCPGCYK

SEQ ID NO: 5078 - protein, 9 aa, synthetic construct
  REGION 1..9: note = short peptide
STDVLKQAI

SEQ ID NO: 5079 - protein, 9 aa, synthetic construct
  REGION 1..9: note = short peptide
DVLGDEICC

SEQ ID NO: 5080 - protein, 9 aa, synthetic construct
  REGION 1..9: note = short peptide
DVLGDEICC

SEQ ID NO: 5081 - protein, 14 aa, synthetic construct
  REGION 1..14: note = short peptide
DVKDLAALRVQLRE

SEQ ID NO: 5082 - protein, 13 aa, synthetic construct
  REGION 1..13: note = short peptide
SLYPSLEDLKVDK

SEQ ID NO: 5083 - protein, 9 aa, synthetic construct
  REGION 1..9: note = short peptide
DTAMINNSR

SEQ ID NO: 5084 - protein, 11 aa, synthetic construct
  REGION 1..11: note = short peptide
FPDPAGKLNQF

SEQ ID NO: 5085 - protein, 8 aa, synthetic construct
  REGION 1..8: note = short peptide
SHSSTLTI

SEQ ID NO: 5086 - protein, 9 aa, synthetic construct
  REGION 1..9: note = short peptide
SHNRSEEFL

SEQ ID NO: 5087 - protein, 8 aa, synthetic construct
  REGION 1..8: note = short peptide
FNYTVRTL

SEQ ID NO: 5088 - protein, 8 aa, synthetic construct
  REGION 1..8: note = short peptide
SHNLYTVL

SEQ ID NO: 5089 - protein, 11 aa, synthetic construct
  REGION 1..11: note = short peptide
SVPQPKPQAPP

SEQ ID NO: 5090 - protein, 11 aa, synthetic construct
  REGION 1..11: note = short peptide
SVPQPKPQAPP

SEQ ID NO: 5091 - protein, 10 aa, synthetic construct
  REGION 1..10: note = short peptide
FPHISQCEDL

SEQ ID NO: 5092 - protein, 9 aa, synthetic construct
  REGION 1..9: note = short peptide
SHGTRMPSL

SEQ ID NO: 5093 - protein, 9 aa, synthetic construct
  REGION 1..9: note = short peptide
SIGDIFLKY

SEQ ID NO: 5094 - protein, 9 aa, synthetic construct
  REGION 1..9: note = short peptide
DVAALLIKY

SEQ ID NO: 5095 - protein, 10 aa, synthetic construct
  REGION 1..10: note = short peptide
DVFRDPALKR

SEQ ID NO: 5096 - protein, 14 aa, synthetic construct
  REGION 1..14: note = short peptide
STRSVSSSSYRRMF

SEQ ID NO: 5097 - protein, 12 aa, synthetic construct
  REGION 1..12: note = short peptide
DVAQNPANMSKY

SEQ ID NO: 5098 - protein, 11 aa, synthetic construct
  REGION 1..11: note = short peptide
DVAEGDLIEHF

SEQ ID NO: 5099 - protein, 9 aa, synthetic construct
  REGION 1..9: note = short peptide
SKFYPIPSL

SEQ ID NO: 5100 - protein, 8 aa, synthetic construct
  REGION 1..8: note = short peptide
SKAVVQVF

SEQ ID NO: 5101 - protein, 11 aa, synthetic construct
  REGION 1..11: note = short peptide
FLNGTGGQTHL

SEQ ID NO: 5102 - protein, 13 aa, synthetic construct
  REGION 1..13: note = short peptide
SVFGKLFGAGGGK

SEQ ID NO: 5103 - protein, 13 aa, synthetic construct
  REGION 1..13: note = short peptide
KQSGYGGQTKPIF

SEQ ID NO: 5104 - protein, 8 aa, synthetic construct
  REGION 1..8: note = short peptide
DTVHIPEA

SEQ ID NO: 5105 - protein, 10 aa, synthetic construct
  REGION 1..10: note = short peptide
STVHEILCKL

SEQ ID NO: 5106 - protein, 9 aa, synthetic construct
  REGION 1..9: note = short peptide
FLNQTGLDA

SEQ ID NO: 5107 - protein, 10 aa, synthetic construct
  REGION 1..10: note = short peptide
DTSVSSVDGP

SEQ ID NO: 5108 - protein, 9 aa, synthetic construct
  REGION 1..9: note = short peptide
SIRFPLFNF

SEQ ID NO: 5109 - protein, 10 aa, synthetic construct
  REGION 1..10: note = short peptide
SIMEKKMKTK

SEQ ID NO: 5110 - protein, 11 aa, synthetic construct
  REGION 1..11: note = short peptide
KQQKAEAEAQK

SEQ ID NO: 5111 - protein, 10 aa, synthetic construct
  REGION 1..10: note = short peptide
EVHSNGSVAY

SEQ ID NO: 5112 - protein, 9 aa, synthetic construct
  REGION 1..9: note = short peptide
SHEDPEVKF

SEQ ID NO: 5113 - protein, 11 aa, synthetic construct
  REGION 1..11: note = short peptide
KVLSDDMKKLK

SEQ ID NO: 5114 - protein, 11 aa, synthetic construct
  REGION 1..11: note = short peptide
SPSDTEGLVKS

SEQ ID NO: 5115 - protein, 9 aa, synthetic construct
  REGION 1..9: note = short peptide
EIVGSIKMR

SEQ ID NO: 5116 - protein, 12 aa, synthetic construct
  REGION 1..12: note = short peptide
KVLRDNIQGITK

SEQ ID NO: 5117 - protein, 10 aa, synthetic construct
  REGION 1..10: note = short peptide
SPRQPSGGQI

SEQ ID NO: 5118 - protein, 15 aa, synthetic construct
  REGION 1..15: note = short peptide
SPRPQAPKANGTSAL

SEQ ID NO: 5119 - protein, 9 aa, synthetic construct
  REGION 1..9: note = short peptide
SRNFSSPIL

SEQ ID NO: 5120 - protein, 9 aa, synthetic construct
  REGION 1..9: note = short peptide
SPSPMDPHM

SEQ ID NO: 5121 - protein, 9 aa, synthetic construct
  REGION 1..9: note = short peptide
SRNGSVFVR

SEQ ID NO: 5122 - protein, 14 aa, synthetic construct
  REGION 1..14: note = short peptide
EKNCEPVVPNAPPA

SEQ ID NO: 5123 - protein, 9 aa, synthetic construct
  REGION 1..9: note = short peptide
SRPPGVPIY

SEQ ID NO: 5124 - protein, 12 aa, synthetic construct
  REGION 1..12: note = short peptide
SPRFPGGPRPTL

SEQ ID NO: 5125 - protein, 10 aa, synthetic construct
  REGION 1..10: note = short peptide
ELDPAGHKSL

SEQ ID NO: 5126 - protein, 9 aa, synthetic construct
  REGION 1..9: note = short peptide
EIIGSRQAL

SEQ ID NO: 5127 - protein, 9 aa, synthetic construct
  REGION 1..9: note = short peptide
EEVKLIKKM

SEQ ID NO: 5128 - protein, 14 aa, synthetic construct
  REGION 1..14: note = short peptide
SQGGRGGGAQAAAR

SEQ ID NO: 5129 - protein, 10 aa, synthetic construct
  REGION 1..10: note = short peptide
EGKATSTTEL

SEQ ID NO: 5130 - protein, 8 aa, synthetic construct
  REGION 1..8: note = short peptide
EGKFPSAA

SEQ ID NO: 5131 - protein, 15 aa, synthetic construct
  REGION 1..15: note = short peptide
SREMQDVDLAEVKPL

SEQ ID NO: 5132 - protein, 9 aa, synthetic construct
  REGION 1..9: note = short peptide
EGKLFSLEL

SEQ ID NO: 5133 - protein, 8 aa, synthetic construct
  REGION 1..8: note = short peptide
EGKTQEAL

SEQ ID NO: 5134 - protein, 8 aa, synthetic construct
  REGION 1..8: note = short peptide
SQLHKENL

SEQ ID NO: 5135 - protein, 15 aa, synthetic construct
  REGION 1..15: note = short peptide
SQKDILEEKRAVPDR

SEQ ID NO: 5136 - protein, 8 aa, synthetic construct
  REGION 1..8: note = short peptide
EGLGSHDR

SEQ ID NO: 5137 - protein, 10 aa, synthetic construct
  REGION 1..10: note = short peptide
EEVLIPDQKY

SEQ ID NO: 5138 - protein, 12 aa, synthetic construct
  REGION 1..12: note = short peptide
EGAPLKLKCELC

SEQ ID NO: 5139 - protein, 9 aa, synthetic construct
  REGION 1..9: note = short peptide
SPVSNKSQK

SEQ ID NO: 5140 - protein, 15 aa, synthetic construct
  REGION 1..15: note = short peptide
EGSEIVVAGRIADNK

SEQ ID NO: 5141 - protein, 9 aa, synthetic construct
  REGION 1..9: note = short peptide
EHAANDVSF

SEQ ID NO: 5142 - protein, 15 aa, synthetic construct
  REGION 1..15: note = short peptide
KRNKQTYSTEPNNLK

SEQ ID NO: 5143 - protein, 10 aa, synthetic construct
  REGION 1..10: note = short peptide
ELMTHHVHTY

SEQ ID NO: 5144 - protein, 10 aa, synthetic construct
  REGION 1..10: note = short peptide
ETILLNGTDR

SEQ ID NO: 5145 - protein, 11 aa, synthetic construct
  REGION 1..11: note = short peptide
SPCKQVSQIKY

SEQ ID NO: 5146 - protein, 14 aa, synthetic construct
  REGION 1..14: note = short peptide
EAPLNPKANREKMT

SEQ ID NO: 5147 - protein, 8 aa, synthetic construct
  REGION 1..8: note = short peptide
KRSSLYIR

SEQ ID NO: 5148 - protein, 9 aa, synthetic construct
  REGION 1..9: note = short peptide
EAMDSPVSL

SEQ ID NO: 5149 - protein, 13 aa, synthetic construct
  REGION 1..13: note = short peptide
SSKVSRDTLYEAV

SEQ ID NO: 5150 - protein, 10 aa, synthetic construct
  REGION 1..10: note = short peptide
SNSTARNVTW

SEQ ID NO: 5151 - protein, 11 aa, synthetic construct
  REGION 1..11: note = short peptide
SSMSPLPSQSR

SEQ ID NO: 5152 - protein, 11 aa, synthetic construct
  REGION 1..11: note = short peptide
ETKTGTCGYCG

SEQ ID NO: 5153 - protein, 12 aa, synthetic construct
  REGION 1..12: note = short peptide
EAAGQGQPVLVR

SEQ ID NO: 5154 - protein, 10 aa, synthetic construct
  REGION 1..10: note = short peptide
SSRSSSTEDF

SEQ ID NO: 5155 - protein, 14 aa, synthetic construct
  REGION 1..14: note = short peptide
SSSGMGGRAPVSRG

SEQ ID NO: 5156 - protein, 14 aa, synthetic construct
  REGION 1..14: note = short peptide
ELQEVVEFLKNPQK

SEQ ID NO: 5157 - protein, 15 aa, synthetic construct
  REGION 1..15: note = short peptide
EPKFLDEPYEAIVPE

SEQ ID NO: 5158 - protein, 10 aa, synthetic construct
  REGION 1..10: note = short peptide
SPMEGTGISL

SEQ ID NO: 5159 - protein, 9 aa, synthetic construct
  REGION 1..9: note = short peptide
SPMDTVTEA

SEQ ID NO: 5160 - protein, 11 aa, synthetic construct
  REGION 1..11: note = short peptide
SRTPRAGVSPK

SEQ ID NO: 5161 - protein, 11 aa, synthetic construct
  REGION 1..11: note = short peptide
EPMPALEGHIF

SEQ ID NO: 5162 - protein, 14 aa, synthetic construct
  REGION 1..14: note = short peptide
EPTKSAPAPKKGSK

SEQ ID NO: 5163 - protein, 9 aa, synthetic construct
  REGION 1..9: note = short peptide
KRMKIIKHF

SEQ ID NO: 5164 - protein, 9 aa, synthetic construct
  REGION 1..9: note = short peptide
KRLIVDVIR

SEQ ID NO: 5165 - protein, 10 aa, synthetic construct
  REGION 1..10: note = short peptide
FPLDPQLAKM

SEQ ID NO: 5166 - protein, 9 aa, synthetic construct
  REGION 1..9: note = short peptide
KSSKIMDSF

SEQ ID NO: 5167 - protein, 9 aa, synthetic construct
  REGION 1..9: note = short peptide
TDNPDLSIL

SEQ ID NO: 5168 - protein, 10 aa, synthetic construct
  REGION 1..10: note = short peptide
RYYEKPCCRR

SEQ ID NO: 5169 - protein, 11 aa, synthetic construct
  REGION 1..11: note = short peptide
GHNLLVSELYN

SEQ ID NO: 5170 - protein, 9 aa, synthetic construct
  REGION 1..9: note = short peptide
RYRPGTVAL

SEQ ID NO: 5171 - protein, 8 aa, synthetic construct
  REGION 1..8: note = short peptide
TDLLLKLL

SEQ ID NO: 5172 - protein, 10 aa, synthetic construct
  REGION 1..10: note = short peptide
GIASSSIAAK

SEQ ID NO: 5173 - protein, 9 aa, synthetic construct
  REGION 1..9: note = short peptide
TDPVSTVTL

SEQ ID NO: 5174 - protein, 9 aa, synthetic construct
  REGION 1..9: note = short peptide
TDQIMMISY

SEQ ID NO: 5175 - protein, 9 aa, synthetic construct
  REGION 1..9: note = short peptide
RYLEKPMEI

SEQ ID NO: 5176 - protein, 8 aa, synthetic construct
  REGION 1..8: note = short peptide
RYIAVEYV

SEQ ID NO: 5177 - protein, 11 aa, synthetic construct
  REGION 1..11: note = short peptide
DFGANVPNMPA

SEQ ID NO: 5178 - protein, 10 aa, synthetic construct
  REGION 1..10: note = short peptide
RYCKNKPYPK

SEQ ID NO: 5179 - protein, 14 aa, synthetic construct
  REGION 1..14: note = short peptide
SAAACEAPSAAGPG

SEQ ID NO: 5180 - protein, 15 aa, synthetic construct
  REGION 1..15: note = short peptide
DIAPTLTLYVGKKQL

SEQ ID NO: 5181 - protein, 11 aa, synthetic construct
  REGION 1..11: note = short peptide
GERGPPGESGA

SEQ ID NO: 5182 - protein, 10 aa, synthetic construct
  REGION 1..10: note = short peptide
TAQKFNNLLK

SEQ ID NO: 5183 - protein, 15 aa, synthetic construct
  REGION 1..15: note = short peptide
KVFIKYTKLKKIFLQ

SEQ ID NO: 5184 - protein, 11 aa, synthetic construct
  REGION 1..11: note = short peptide
GEVGLPGLSGP

SEQ ID NO: 5185 - protein, 14 aa, synthetic construct
  REGION 1..14: note = short peptide
DIKCVLNEGMPIYR

SEQ ID NO: 5186 - protein, 14 aa, synthetic construct
  REGION 1..14: note = short peptide
SAQGSDVSLTACKV

SEQ ID NO: 5187 - protein, 8 aa, synthetic construct
  REGION 1..8: note = short peptide
DHNASHSL

SEQ ID NO: 5188 - protein, 9 aa, synthetic construct
  REGION 1..9: note = short peptide
DHDRPMNTL

SEQ ID NO: 5189 - protein, 9 aa, synthetic construct
  REGION 1..9: note = short peptide
DGSSNGKVA

SEQ ID NO: 5190 - protein, 12 aa, synthetic construct
  REGION 1..12: note = short peptide
TDAEADVASLNR

SEQ ID NO: 5191 - protein, 8 aa, synthetic construct
  REGION 1..8: note = short peptide
TDSEKHFF

SEQ ID NO: 5192 - protein, 9 aa, synthetic construct
  REGION 1..9: note = short peptide
GPHIASVTL

SEQ ID NO: 5193 - protein, 9 aa, synthetic construct
  REGION 1..9: note = short peptide
KRYKSIVKY

SEQ ID NO: 5194 - protein, 10 aa, synthetic construct
  REGION 1..10: note = short peptide
KPSKSNKGSI

SEQ ID NO: 5195 - protein, 10 aa, synthetic construct
  REGION 1..10: note = short peptide
TERKPAATAR

SEQ ID NO: 5196 - protein, 9 aa, synthetic construct
  REGION 1..9: note = short peptide
RVAPEEHPV

SEQ ID NO: 5197 - protein, 9 aa, synthetic construct
  REGION 1..9: note = short peptide
RTYKSPLRH

SEQ ID NO: 5198 - protein, 10 aa, synthetic construct
  REGION 1..10: note = short peptide
RTYGDSGKTK

SEQ ID NO: 5199 - protein, 9 aa, synthetic construct
  REGION 1..9: note = short peptide
RVGRSHSVR

SEQ ID NO: 5200 - protein, 9 aa, synthetic construct
  REGION 1..9: note = short peptide
KSAEIYPIM

SEQ ID NO: 5201 - protein, 8 aa, synthetic construct
  REGION 1..8: note = short peptide
TFDNSGNI

SEQ ID NO: 5202 - protein, 10 aa, synthetic construct
  REGION 1..10: note = short peptide
DDFEFPIGTY

SEQ ID NO: 5203 - protein, 9 aa, synthetic construct
  REGION 1..9: note = short peptide
GMGKPAITK

SEQ ID NO: 5204 - protein, 9 aa, synthetic construct
  REGION 1..9: note = short peptide
TDWLDGKHV

SEQ ID NO: 5205 - protein, 10 aa, synthetic construct
  REGION 1..10: note = short peptide
GLDPGGPPAL

SEQ ID NO: 5206 - protein, 14 aa, synthetic construct
  REGION 1..14: note = short peptide
GKIVDLVKELDRDT

SEQ ID NO: 5207 - protein, 10 aa, synthetic construct
  REGION 1..10: note = short peptide
RVRVPGPVHL

SEQ ID NO: 5208 - protein, 10 aa, synthetic construct
  REGION 1..10: note = short peptide
DEPDHDPVEI

SEQ ID NO: 5209 - protein, 10 aa, synthetic construct
  REGION 1..10: note = short peptide
DEMARHLREY

SEQ ID NO: 5210 - protein, 11 aa, synthetic construct
  REGION 1..11: note = short peptide
RVQEAVESMVK

SEQ ID NO: 5211 - protein, 10 aa, synthetic construct
  REGION 1..10: note = short peptide
RVNRGGGPIR

SEQ ID NO: 5212 - protein, 9 aa, synthetic construct
  REGION 1..9: note = short peptide
KPVAAKPAA

SEQ ID NO: 5213 - protein, 8 aa, synthetic construct
  REGION 1..8: note = short peptide
DELRAKAL

SEQ ID NO: 5214 - protein, 9 aa, synthetic construct
  REGION 1..9: note = short peptide
DEGHPFKAY

SEQ ID NO: 5215 - protein, 14 aa, synthetic construct
  REGION 1..14: note = short peptide
TEKLVTSKGDKELR

SEQ ID NO: 5216 - protein, 11 aa, synthetic construct
  REGION 1..11: note = short peptide
RVLGPCSDILK

SEQ ID NO: 5217 - protein, 12 aa, synthetic construct
  REGION 1..12: note = short peptide
RVKDINSSTKTR

SEQ ID NO: 5218 - protein, 10 aa, synthetic construct
  REGION 1..10: note = short peptide
DEARNLHSKW

SEQ ID NO: 5219 - protein, 12 aa, synthetic construct
  REGION 1..12: note = short peptide
FPNNPVELKALY

SEQ ID NO: 5220 - protein, 15 aa, synthetic construct
  REGION 1..15: note = short peptide
DQATYYRFWYPKWEM

SEQ ID NO: 5221 - protein, 12 aa, synthetic construct
  REGION 1..12: note = short peptide
SGGSSCSQTPSR

SEQ ID NO: 5222 - protein, 10 aa, synthetic construct
  REGION 1..10: note = short peptide
FTDVNSILRY

SEQ ID NO: 5223 - protein, 8 aa, synthetic construct
  REGION 1..8: note = short peptide
FTNKTLSF

SEQ ID NO: 5224 - protein, 10 aa, synthetic construct
  REGION 1..10: note = short peptide
SGLLNCSPAA

SEQ ID NO: 5225 - protein, 13 aa, synthetic construct
  REGION 1..13: note = short peptide
DPYSAHNSTEFLI

SEQ ID NO: 5226 - protein, 12 aa, synthetic construct
  REGION 1..12: note = short peptide
SGDTTAPKKTSF

SEQ ID NO: 5227 - protein, 9 aa, synthetic construct
  REGION 1..9: note = short peptide
SYQKVIELF

SEQ ID NO: 5228 - protein, 8 aa, synthetic construct
  REGION 1..8: note = short peptide
SFPGGAAF

SEQ ID NO: 5229 - protein, 13 aa, synthetic construct
  REGION 1..13: note = short peptide
FVYNGTLKDSHSY

SEQ ID NO: 5230 - protein, 10 aa, synthetic construct
  REGION 1..10: note = short peptide
FVYNITTNKY

SEQ ID NO: 5231 - protein, 12 aa, synthetic construct
  REGION 1..12: note = short peptide
FSVSTSLKKHMR

SEQ ID NO: 5232 - protein, 11 aa, synthetic construct
  REGION 1..11: note = short peptide
KWLEPLKNLRF

SEQ ID NO: 5233 - protein, 9 aa, synthetic construct
  REGION 1..9: note = short peptide
SGYGGQTKP

SEQ ID NO: 5234 - protein, 9 aa, synthetic construct
  REGION 1..9: note = short peptide
KVYNKLDSK

SEQ ID NO: 5235 - protein, 10 aa, synthetic construct
  REGION 1..10: note = short peptide
FPRGAGSSAF

SEQ ID NO: 5236 - protein, 15 aa, synthetic construct
  REGION 1..15: note = short peptide
FPRGMNPTGTGAVSF

SEQ ID NO: 5237 - protein, 14 aa, synthetic construct
  REGION 1..14: note = short peptide
SGRGKQGGKARAKA

SEQ ID NO: 5238 - protein, 11 aa, synthetic construct
  REGION 1..11: note = short peptide
SVSTVLTSKYR

SEQ ID NO: 5239 - protein, 9 aa, synthetic construct
  REGION 1..9: note = short peptide
FPSIYDVKY

SEQ ID NO: 5240 - protein, 9 aa, synthetic construct
  REGION 1..9: note = short peptide
FPVEVEVPM

SEQ ID NO: 5241 - protein, 11 aa, synthetic construct
  REGION 1..11: note = short peptide
FPWEVPKKLKY

SEQ ID NO: 5242 - protein, 9 aa, synthetic construct
  REGION 1..9: note = short peptide
KVIETQLAK

SEQ ID NO: 5243 - protein, 13 aa, synthetic construct
  REGION 1..13: note = short peptide
FRSRGGGGGGFHR

SEQ ID NO: 5244 - protein, 10 aa, synthetic construct
  REGION 1..10: note = short peptide
FSDHHTMCYC

SEQ ID NO: 5245 - protein, 13 aa, synthetic construct
  REGION 1..13: note = short peptide
KVYTKGAGSGELK

SEQ ID NO: 5246 - protein, 15 aa, synthetic construct
  REGION 1..15: note = short peptide
DRNTQIFKTNTQTYR

SEQ ID NO: 5247 - protein, 9 aa, synthetic construct
  REGION 1..9: note = short peptide
FSSEASISF

SEQ ID NO: 5248 - protein, 9 aa, synthetic construct
  REGION 1..9: note = short peptide
SEASETPMA

SEQ ID NO: 5249 - protein, 10 aa, synthetic construct
  REGION 1..10: note = short peptide
SEARGINGGP

SEQ ID NO: 5250 - protein, 8 aa, synthetic construct
  REGION 1..8: note = short peptide
SDSVKSTF

SEQ ID NO: 5251 - protein, 8 aa, synthetic construct
  REGION 1..8: note = short peptide
TAHYPVPF

SEQ ID NO: 5252 - protein, 9 aa, synthetic construct
  REGION 1..9: note = short peptide
GEAERFMTP

SEQ ID NO: 5253 - protein, 9 aa, synthetic construct
  REGION 1..9: note = short peptide
TAKLVNKVI

SEQ ID NO: 5254 - protein, 9 aa, synthetic construct
  REGION 1..9: note = short peptide
GEAQKLKNQ

SEQ ID NO: 5255 - protein, 11 aa, synthetic construct
  REGION 1..11: note = short peptide
TALIPGKKAPV

SEQ ID NO: 5256 - protein, 10 aa, synthetic construct
  REGION 1..10: note = short peptide
GEGNLSRPAV

SEQ ID NO: 5257 - protein, 9 aa, synthetic construct
  REGION 1..9: note = short peptide
GEIKGFTGI

SEQ ID NO: 5258 - protein, 9 aa, synthetic construct
  REGION 1..9: note = short peptide
TADAEPPKI

SEQ ID NO: 5259 - protein, 10 aa, synthetic construct
  REGION 1..10: note = short peptide
GDMKVPDVDI

SEQ ID NO: 5260 - protein, 10 aa, synthetic construct
  REGION 1..10: note = short peptide
DLVTSISVPP

SEQ ID NO: 5261 - protein, 8 aa, synthetic construct
  REGION 1..8: note = short peptide
DLMLRKAL

SEQ ID NO: 5262 - protein, 9 aa, synthetic construct
  REGION 1..9: note = short peptide
SEEPGHFSL

SEQ ID NO: 5263 - protein, 14 aa, synthetic construct
  REGION 1..14: note = short peptide
TAALSTDPSVLGKY

SEQ ID NO: 5264 - protein, 11 aa, synthetic construct
  REGION 1..11: note = short peptide
TAAPPPHPGAP

SEQ ID NO: 5265 - protein, 10 aa, synthetic construct
  REGION 1..10: note = short peptide
TAASRPPVTL

SEQ ID NO: 5266 - protein, 10 aa, synthetic construct
  REGION 1..10: note = short peptide
SEGSLGNSRS

SEQ ID NO: 5267 - protein, 9 aa, synthetic construct
  REGION 1..9: note = short peptide
SEGNGSHTI

SEQ ID NO: 5268 - protein, 11 aa, synthetic construct
  REGION 1..11: note = short peptide
SRAGPLSGKKF

SEQ ID NO: 5269 - protein, 9 aa, synthetic construct
  REGION 1..9: note = short peptide
AIMNNMSLI

SEQ ID NO: 5270 - protein, 9 aa, synthetic construct
  REGION 1..9: note = short peptide
AHTNVTLAL

SEQ ID NO: 5271 - protein, 8 aa, synthetic construct
  REGION 1..8: note = short peptide
KTIKMWDV

SEQ ID NO: 5272 - protein, 9 aa, synthetic construct
  REGION 1..9: note = short peptide
KEMEVSPSA

SEQ ID NO: 5273 - protein, 9 aa, synthetic construct
  REGION 1..9: note = short peptide
AHDQFKATL

SEQ ID NO: 5274 - protein, 9 aa, synthetic construct
  REGION 1..9: note = short peptide
KENETRVVL

SEQ ID NO: 5275 - protein, 12 aa, synthetic construct
  REGION 1..12: note = short peptide
KEPAEPTCPAPA

SEQ ID NO: 5276 - protein, 10 aa, synthetic construct
  REGION 1..10: note = short peptide
MPVRPTTNTF

SEQ ID NO: 5277 - protein, 15 aa, synthetic construct
  REGION 1..15: note = short peptide
YLRGGAGVGSMTKIY

SEQ ID NO: 5278 - protein, 9 aa, synthetic construct
  REGION 1..9: note = short peptide
KEQEPMPTV

SEQ ID NO: 5279 - protein, 12 aa, synthetic construct
  REGION 1..12: note = short peptide
KTINQTIGNVVY

SEQ ID NO: 5280 - protein, 9 aa, synthetic construct
  REGION 1..9: note = short peptide
KLLCPQKLK

SEQ ID NO: 5281 - protein, 8 aa, synthetic construct
  REGION 1..8: note = short peptide
AKRHLYIL

SEQ ID NO: 5282 - protein, 9 aa, synthetic construct
  REGION 1..9: note = short peptide
YNDPSVLYI

SEQ ID NO: 5283 - protein, 10 aa, synthetic construct
  REGION 1..10: note = short peptide
KLLEGEESRL

SEQ ID NO: 5284 - protein, 11 aa, synthetic construct
  REGION 1..11: note = short peptide
LVTSKGDKELR

SEQ ID NO: 5285 - protein, 9 aa, synthetic construct
  REGION 1..9: note = short peptide
LFLDHKTLY

SEQ ID NO: 5286 - protein, 10 aa, synthetic construct
  REGION 1..10: note = short peptide
LVVYPWTQRF

SEQ ID NO: 5287 - protein, 14 aa, synthetic construct
  REGION 1..14: note = short peptide
AKAAAIGIDLGTTY

SEQ ID NO: 5288 - protein, 15 aa, synthetic construct
  REGION 1..15: note = short peptide
VLSPADKTNVKAAWG

SEQ ID NO: 5289 - protein, 8 aa, synthetic construct
  REGION 1..8: note = short peptide
KEGGNINK

SEQ ID NO: 5290 - protein, 9 aa, synthetic construct
  REGION 1..9: note = short peptide
MQAPAVRQV

SEQ ID NO: 5291 - protein, 9 aa, synthetic construct
  REGION 1..9: note = short peptide
VPLHYNESY

SEQ ID NO: 5292 - protein, 9 aa, synthetic construct
  REGION 1..9: note = short peptide
LGGRGYLAY

SEQ ID NO: 5293 - protein, 9 aa, synthetic construct
  REGION 1..9: note = short peptide
MPVFPDFKM

SEQ ID NO: 5294 - protein, 9 aa, synthetic construct
  REGION 1..9: note = short peptide
VPMGGVRLV

SEQ ID NO: 5295 - protein, 9 aa, synthetic construct
  REGION 1..9: note = short peptide
VPMGGVRLV

SEQ ID NO: 5296 - protein, 13 aa, synthetic construct
  REGION 1..13: note = short peptide
AGKQAVSASGKWL

SEQ ID NO: 5297 - protein, 9 aa, synthetic construct
  REGION 1..9: note = short peptide
KGDKCLLKY

SEQ ID NO: 5298 - protein, 10 aa, synthetic construct
  REGION 1..10: note = short peptide
MDPRKVNELR

SEQ ID NO: 5299 - protein, 13 aa, synthetic construct
  REGION 1..13: note = short peptide
AGKKNVLSSLAVY

SEQ ID NO: 5300 - protein, 10 aa, synthetic construct
  REGION 1..10: note = short peptide
MDTSRVQPIK

SEQ ID NO: 5301 - protein, 11 aa, synthetic construct
  REGION 1..11: note = short peptide
KPGLDGLPGAP

SEQ ID NO: 5302 - protein, 14 aa, synthetic construct
  REGION 1..14: note = short peptide
KGFGRGGAESHTFK

SEQ ID NO: 5303 - protein, 9 aa, synthetic construct
  REGION 1..9: note = short peptide
VPQSNETAL

SEQ ID NO: 5304 - protein, 9 aa, synthetic construct
  REGION 1..9: note = short peptide
VPQTVPMRL

SEQ ID NO: 5305 - protein, 9 aa, synthetic construct
  REGION 1..9: note = short peptide
KETKGMISL

SEQ ID NO: 5306 - protein, 9 aa, synthetic construct
  REGION 1..9: note = short peptide
KEVAGPAVL

SEQ ID NO: 5307 - protein, 12 aa, synthetic construct
  REGION 1..12: note = short peptide
KEVDPASNTYTL

SEQ ID NO: 5308 - protein, 12 aa, synthetic construct
  REGION 1..12: note = short peptide
AGVSFSGHRLEL

SEQ ID NO: 5309 - protein, 8 aa, synthetic construct
  REGION 1..8: note = short peptide
MDELVEHY

SEQ ID NO: 5310 - protein, 9 aa, synthetic construct
  REGION 1..9: note = short peptide
YLKTKFICV

SEQ ID NO: 5311 - protein, 11 aa, synthetic construct
  REGION 1..11: note = short peptide
KSQGVGPIRKV

SEQ ID NO: 5312 - protein, 9 aa, synthetic construct
  REGION 1..9: note = short peptide
KFIDTTSKF

SEQ ID NO: 5313 - protein, 9 aa, synthetic construct
  REGION 1..9: note = short peptide
KFIDTTSKF

SEQ ID NO: 5314 - protein, 9 aa, synthetic construct
  REGION 1..9: note = short peptide
KFIDTTSKF

SEQ ID NO: 5315 - protein, 11 aa, synthetic construct
  REGION 1..11: note = short peptide
MPVGPDAILRY

SEQ ID NO: 5316 - protein, 10 aa, synthetic construct
  REGION 1..10: note = short peptide
KLHMGFKSSL

SEQ ID NO: 5317 - protein, 10 aa, synthetic construct
  REGION 1..10: note = short peptide
VPLDGRPMNI

SEQ ID NO: 5318 - protein, 15 aa, synthetic construct
  REGION 1..15: note = short peptide
MSRYELKLAIPEGKQ

SEQ ID NO: 5319 - protein, 13 aa, synthetic construct
  REGION 1..13: note = short peptide
LSQPKIVKWDRDM

SEQ ID NO: 5320 - protein, 9 aa, synthetic construct
  REGION 1..9: note = short peptide
VIKPVLPKL

SEQ ID NO: 5321 - protein, 9 aa, synthetic construct
  REGION 1..9: note = short peptide
LELEKTRDM

SEQ ID NO: 5322 - protein, 8 aa, synthetic construct
  REGION 1..8: note = short peptide
LTDSSLKY

SEQ ID NO: 5323 - protein, 10 aa, synthetic construct
  REGION 1..10: note = short peptide
KDFGDLSFTP

SEQ ID NO: 5324 - protein, 11 aa, synthetic construct
  REGION 1..11: note = short peptide
VLQAADILLYK

SEQ ID NO: 5325 - protein, 9 aa, synthetic construct
  REGION 1..9: note = short peptide
VINEPTAAA

SEQ ID NO: 5326 - protein, 10 aa, synthetic construct
  REGION 1..10: note = short peptide
NHHKTVTCLC

SEQ ID NO: 5327 - protein, 8 aa, synthetic construct
  REGION 1..8: note = short peptide
KDFSHPQM

SEQ ID NO: 5328 - protein, 8 aa, synthetic construct
  REGION 1..8: note = short peptide
AAVDLEKL

SEQ ID NO: 5329 - protein, 9 aa, synthetic construct
  REGION 1..9: note = short peptide
AAVDLEKLR

SEQ ID NO: 5330 - protein, 13 aa, synthetic construct
  REGION 1..13: note = short peptide
AASKKAVLGPLVG

SEQ ID NO: 5331 - protein, 10 aa, synthetic construct
  REGION 1..10: note = short peptide
NIASPGTVHK

SEQ ID NO: 5332 - protein, 15 aa, synthetic construct
  REGION 1..15: note = short peptide
VIKAVDKKAAGAGKV

SEQ ID NO: 5333 - protein, 8 aa, synthetic construct
  REGION 1..8: note = short peptide
KNVSVKDI

SEQ ID NO: 5334 - protein, 10 aa, synthetic construct
  REGION 1..10: note = short peptide
KLSAPVSQKM

SEQ ID NO: 5335 - protein, 9 aa, synthetic construct
  REGION 1..9: note = short peptide
KAVSLFLCY

SEQ ID NO: 5336 - protein, 10 aa, synthetic construct
  REGION 1..10: note = short peptide
LTAAKKARAG

SEQ ID NO: 5337 - protein, 15 aa, synthetic construct
  REGION 1..15: note = short peptide
ALRYPMAVGLNKGHK

SEQ ID NO: 5338 - protein, 8 aa, synthetic construct
  REGION 1..8: note = short peptide
ALRYPMAV

SEQ ID NO: 5339 - protein, 9 aa, synthetic construct
  REGION 1..9: note = short peptide
NLAKCIVSV

SEQ ID NO: 5340 - protein, 15 aa, synthetic construct
  REGION 1..15: note = short peptide
KCIAAKKIKQSVGNK

SEQ ID NO: 5341 - protein, 11 aa, synthetic construct
  REGION 1..11: note = short peptide
KSKLDAEVSKW

SEQ ID NO: 5342 - protein, 9 aa, synthetic construct
  REGION 1..9: note = short peptide
VKFINKIQY

SEQ ID NO: 5343 - protein, 10 aa, synthetic construct
  REGION 1..10: note = short peptide
AAVGRVGSFG

SEQ ID NO: 5344 - protein, 9 aa, synthetic construct
  REGION 1..9: note = short peptide
VLHNLKDRY

SEQ ID NO: 5345 - protein, 8 aa, synthetic construct
  REGION 1..8: note = short peptide
KNYRIDTI

SEQ ID NO: 5346 - protein, 9 aa, synthetic construct
  REGION 1..9: note = short peptide
NAFEVAEKY

SEQ ID NO: 5347 - protein, 9 aa, synthetic construct
  REGION 1..9: note = short peptide
ADAASQVLL

SEQ ID NO: 5348 - protein, 9 aa, synthetic construct
  REGION 1..9: note = short peptide
LVDCSTEKY

SEQ ID NO: 5349 - protein, 9 aa, synthetic construct
  REGION 1..9: note = short peptide
KEANSSPGL

SEQ ID NO: 5350 - protein, 11 aa, synthetic construct
  REGION 1..11: note = short peptide
MTGYGMPRQIL

SEQ ID NO: 5351 - protein, 14 aa, synthetic construct
  REGION 1..14: note = short peptide
LVDVEPKVKSKKRE

SEQ ID NO: 5352 - protein, 8 aa, synthetic construct
  REGION 1..8: note = short peptide
NAVKLIDK

SEQ ID NO: 5353 - protein, 9 aa, synthetic construct
  REGION 1..9: note = short peptide
LTGTTASNN

SEQ ID NO: 5354 - protein, 8 aa, synthetic construct
  REGION 1..8: note = short peptide
KDKIGVEL

SEQ ID NO: 5355 - protein, 10 aa, synthetic construct
  REGION 1..10: note = short peptide
KLNPYAKTMR

SEQ ID NO: 5356 - protein, 10 aa, synthetic construct
  REGION 1..10: note = short peptide
KSVPWVPILK

SEQ ID NO: 5357 - protein, 9 aa, synthetic construct
  REGION 1..9: note = short peptide
LEYALKQER

SEQ ID NO: 5358 - protein, 10 aa, synthetic construct
  REGION 1..10: note = short peptide
YPFKPPKVTF

SEQ ID NO: 5359 - protein, 9 aa, synthetic construct
  REGION 1..9: note = short peptide
KDSSRSHSI

SEQ ID NO: 5360 - protein, 9 aa, synthetic construct
  REGION 1..9: note = short peptide
KGGKLNSAK

SEQ ID NO: 5361 - protein, 13 aa, synthetic construct
  REGION 1..13: note = short peptide
VVFPPGEMPIILK

SEQ ID NO: 5362 - protein, 9 aa, synthetic construct
  REGION 1..9: note = short peptide
LKRAPGPKP

SEQ ID NO: 5363 - protein, 8 aa, synthetic construct
  REGION 1..8: note = short peptide
KKLRIPAI

SEQ ID NO: 5364 - protein, 8 aa, synthetic construct
  REGION 1..8: note = short peptide
KTEAKRNK

SEQ ID NO: 5365 - protein, 9 aa, synthetic construct
  REGION 1..9: note = short peptide
AENSYVKMT

SEQ ID NO: 5366 - protein, 11 aa, synthetic construct
  REGION 1..11: note = short peptide
VVFNQSNIHEY

SEQ ID NO: 5367 - protein, 10 aa, synthetic construct
  REGION 1..10: note = short peptide
KIKNGTPPMR

SEQ ID NO: 5368 - protein, 14 aa, synthetic construct
  REGION 1..14: note = short peptide
MNDTVTIRTRKFMT

SEQ ID NO: 5369 - protein, 9 aa, synthetic construct
  REGION 1..9: note = short peptide
MPFGNVVSA

SEQ ID NO: 5370 - protein, 12 aa, synthetic construct
  REGION 1..12: note = short peptide
YASSPGGVYATR

SEQ ID NO: 5371 - protein, 12 aa, synthetic construct
  REGION 1..12: note = short peptide
YASSPGGVYATR

SEQ ID NO: 5372 - protein, 9 aa, synthetic construct
  REGION 1..9: note = short peptide
KKIKDLPSL

SEQ ID NO: 5373 - protein, 10 aa, synthetic construct
  REGION 1..10: note = short peptide
AEMGKGSFKY

SEQ ID NO: 5374 - protein, 15 aa, synthetic construct
  REGION 1..15: note = short peptide
KKPALKKLTLLPAVV

SEQ ID NO: 5375 - protein, 10 aa, synthetic construct
  REGION 1..10: note = short peptide
KIFTCGSDLR

SEQ ID NO: 5376 - protein, 9 aa, synthetic construct
  REGION 1..9: note = short peptide
KKPGQKKSK

SEQ ID NO: 5377 - protein, 9 aa, synthetic construct
  REGION 1..9: note = short peptide
VTYNYPVHY

SEQ ID NO: 5378 - protein, 10 aa, synthetic construct
  REGION 1..10: note = short peptide
ADNFSLHDAL

SEQ ID NO: 5379 - protein, 11 aa, synthetic construct
  REGION 1..11: note = short peptide
MPIKDNALVMF

SEQ ID NO: 5380 - protein, 11 aa, synthetic construct
  REGION 1..11: note = short peptide
VTESPAKFALY

SEQ ID NO: 5381 - protein, 10 aa, synthetic construct
  REGION 1..10: note = short peptide
MPIEPGDIGY

SEQ ID NO: 5382 - protein, 9 aa, synthetic construct
  REGION 1..9: note = short peptide
MPIEIEQKP

SEQ ID NO: 5383 - protein, 10 aa, synthetic construct
  REGION 1..10: note = short peptide
YECPQCGKAF

SEQ ID NO: 5384 - protein, 12 aa, synthetic construct
  REGION 1..12: note = short peptide
MPIDLGEKTIYL

SEQ ID NO: 5385 - protein, 9 aa, synthetic construct
  REGION 1..9: note = short peptide
MPHSSSAKL

SEQ ID NO: 5386 - protein, 15 aa, synthetic construct
  REGION 1..15: note = short peptide
YDGKDYIALNEDLRS

SEQ ID NO: 5387 - protein, 9 aa, synthetic construct
  REGION 1..9: note = short peptide
MPHNQFIKM

SEQ ID NO: 5388 - protein, 9 aa, synthetic construct
  REGION 1..9: note = short peptide
KIYEGQVEV

SEQ ID NO: 5389 - protein, 8 aa, synthetic construct
  REGION 1..8: note = short peptide
KSLGPLGI

SEQ ID NO: 5390 - protein, 10 aa, synthetic construct
  REGION 1..10: note = short peptide
KKAKGCTIIF

SEQ ID NO: 5391 - protein, 9 aa, synthetic construct
  REGION 1..9: note = short peptide
AEFAERSVA

SEQ ID NO: 5392 - protein, 11 aa, synthetic construct
  REGION 1..11: note = short peptide
VYNDIGKEMLL

SEQ ID NO: 5393 - protein, 10 aa, synthetic construct
  REGION 1..10: note = short peptide
VYPPGPYHPF

SEQ ID NO: 5394 - protein, 11 aa, synthetic construct
  REGION 1..11: note = short peptide
AEFAERSVAKL

SEQ ID NO: 5395 - protein, 11 aa, synthetic construct
  REGION 1..11: note = short peptide
VYPWTQRFFDS

SEQ ID NO: 5396 - protein, 9 aa, synthetic construct
  REGION 1..9: note = short peptide
MPAQWEFQI

SEQ ID NO: 5397 - protein, 11 aa, synthetic construct
  REGION 1..11: note = short peptide
MPAPLLKNVQL

SEQ ID NO: 5398 - protein, 12 aa, synthetic construct
  REGION 1..12: note = short peptide
WEAFLPEAKAIA

SEQ ID NO: 5399 - protein, 10 aa, synthetic construct
  REGION 1..10: note = short peptide
MPANGETVTL

SEQ ID NO: 5400 - protein, 9 aa, synthetic construct
  REGION 1..9: note = short peptide
MPAGSFITA

SEQ ID NO: 5401 - protein, 10 aa, synthetic construct
  REGION 1..10: note = short peptide
MNQEKLAKLQ

SEQ ID NO: 5402 - protein, 10 aa, synthetic construct
  REGION 1..10: note = short peptide
KIPIPSVPTF

SEQ ID NO: 5403 - protein, 14 aa, synthetic construct
  REGION 1..14: note = short peptide
AELGEADEAELQRL

SEQ ID NO: 5404 - protein, 12 aa, synthetic construct
  REGION 1..12: note = short peptide
KKHQGVSKTQSL

SEQ ID NO: 5405 - protein, 9 aa, synthetic construct
  REGION 1..9: note = short peptide
VVYPWTQRF

SEQ ID NO: 5406 - protein, 8 aa, synthetic construct
  REGION 1..8: note = short peptide
AEKTAAKM

SEQ ID NO: 5407 - protein, 10 aa, synthetic construct
  REGION 1..10: note = short peptide
MPEQIVIHAL

SEQ ID NO: 5408 - protein, 13 aa, synthetic construct
  REGION 1..13: note = short peptide
LKLVPPMEEDYPQ

SEQ ID NO: 5409 - protein, 12 aa, synthetic construct
  REGION 1..12: note = short peptide
KISMPDVDLHVK

SEQ ID NO: 5410 - protein, 12 aa, synthetic construct
  REGION 1..12: note = short peptide
VVYPWTQRFFDS

SEQ ID NO: 5411 - protein, 10 aa, synthetic construct
  REGION 1..10: note = short peptide
KISSKVDASL

SEQ ID NO: 5412 - protein, 10 aa, synthetic construct
  REGION 1..10: note = short peptide
MPEEKLVEAL

SEQ ID NO: 5413 - protein, 11 aa, synthetic construct
  REGION 1..11: note = short peptide
KKTAKLHVAVK

SEQ ID NO: 5414 - protein, 12 aa, synthetic construct
  REGION 1..12: note = short peptide
MPILSPGNTQTL

SEQ ID NO: 5415 - protein, 11 aa, synthetic construct
  REGION 1..11: note = short peptide
VPVRGGPKFAA

SEQ ID NO: 5416 - protein, 12 aa, synthetic construct
  REGION 1..12: note = short peptide
YGYNQRPPYGYY

SEQ ID NO: 5417 - protein, 9 aa, synthetic construct
  REGION 1..9: note = short peptide
AEVKKPAAA

SEQ ID NO: 5418 - protein, 13 aa, synthetic construct
  REGION 1..13: note = short peptide
MPQPSQEGISEIL

SEQ ID NO: 5419 - protein, 10 aa, synthetic construct
  REGION 1..10: note = short peptide
IHNNSATSAL

SEQ ID NO: 5420 - protein, 9 aa, synthetic construct
  REGION 1..9: note = short peptide
KGLQTNVSI

SEQ ID NO: 5421 - protein, 8 aa, synthetic construct
  REGION 1..8: note = short peptide
AEVFIVKM

SEQ ID NO: 5422 - protein, 10 aa, synthetic construct
  REGION 1..10: note = short peptide
KGPKSNLLAR

SEQ ID NO: 5423 - protein, 9 aa, synthetic construct
  REGION 1..9: note = short peptide
VQQGGGMRF

SEQ ID NO: 5424 - protein, 10 aa, synthetic construct
  REGION 1..10: note = short peptide
MPPHIGDQPL

SEQ ID NO: 5425 - protein, 14 aa, synthetic construct
  REGION 1..14: note = short peptide
KLEDYDKAETEASK

SEQ ID NO: 5426 - protein, 8 aa, synthetic construct
  REGION 1..8: note = short peptide
AFANLRKV

SEQ ID NO: 5427 - protein, 11 aa, synthetic construct
  REGION 1..11: note = short peptide
KLETHASMRKK

SEQ ID NO: 5428 - protein, 10 aa, synthetic construct
  REGION 1..10: note = short peptide
KGGNSAILNR

SEQ ID NO: 5429 - protein, 9 aa, synthetic construct
  REGION 1..9: note = short peptide
KGGQSQLTL

SEQ ID NO: 5430 - protein, 10 aa, synthetic construct
  REGION 1..10: note = short peptide
MPSQPLHIVL

SEQ ID NO: 5431 - protein, 11 aa, synthetic construct
  REGION 1..11: note = short peptide
MPSPIMHPLIL

SEQ ID NO: 5432 - protein, 9 aa, synthetic construct
  REGION 1..9: note = short peptide
MPSLQPVVM

SEQ ID NO: 5433 - protein, 10 aa, synthetic construct
  REGION 1..10: note = short peptide
KGKNIKIISK

SEQ ID NO: 5434 - protein, 11 aa, synthetic construct
  REGION 1..11: note = short peptide
MPRTGNGPMSV

SEQ ID NO: 5435 - protein, 8 aa, synthetic construct
  REGION 1..8: note = short peptide
KPEKTEKK

SEQ ID NO: 5436 - protein, 10 aa, synthetic construct
  REGION 1..10: note = short peptide
MPLPGVGEEL

SEQ ID NO: 5437 - protein, 12 aa, synthetic construct
  REGION 1..12: note = short peptide
MPLNPTDPLLAY

SEQ ID NO: 5438 - protein, 12 aa, synthetic construct
  REGION 1..12: note = short peptide
VSRMKETQKSIY

SEQ ID NO: 5439 - protein, 9 aa, synthetic construct
  REGION 1..9: note = short peptide
MPKVKMPKF

SEQ ID NO: 5440 - protein, 13 aa, synthetic construct
  REGION 1..13: note = short peptide
MKHATKTAKDALS

SEQ ID NO: 5441 - protein, 12 aa, synthetic construct
  REGION 1..12: note = short peptide
YFYDPDVGNFHY

SEQ ID NO: 5442 - protein, 11 aa, synthetic construct
  REGION 1..11: note = short peptide
MPKGTEFGIDY

SEQ ID NO: 5443 - protein, 9 aa, synthetic construct
  REGION 1..9: note = short peptide
MPKAEKNAV

SEQ ID NO: 5444 - protein, 11 aa, synthetic construct
  REGION 1..11: note = short peptide
MPIYEAADKAL

SEQ ID NO: 5445 - protein, 9 aa, synthetic construct
  REGION 1..9: note = short peptide
YFLRPMLQY

SEQ ID NO: 5446 - protein, 12 aa, synthetic construct
  REGION 1..12: note = short peptide
MPISSHVDLGLL

SEQ ID NO: 5447 - protein, 11 aa, synthetic construct
  REGION 1..11: note = short peptide
KSLPASITMHK

SEQ ID NO: 5448 - protein, 12 aa, synthetic construct
  REGION 1..12: note = short peptide
AEVDLPKLDGAL

SEQ ID NO: 5449 - protein, 9 aa, synthetic construct
  REGION 1..9: note = short peptide
KSNLINHQR

SEQ ID NO: 5450 - protein, 10 aa, synthetic construct
  REGION 1..10: note = short peptide
MPNGTPHPTA

SEQ ID NO: 5451 - protein, 10 aa, synthetic construct
  REGION 1..10: note = short peptide
MPNGTPHPTA

SEQ ID NO: 5452 - protein, 9 aa, synthetic construct
  REGION 1..9: note = short peptide
MPNASFSTL

SEQ ID NO: 5453 - protein, 9 aa, synthetic construct
  REGION 1..9: note = short peptide
VSAIKTAPA

SEQ ID NO: 5454 - protein, 9 aa, synthetic construct
  REGION 1..9: note = short peptide
VSAIKTAPA

SEQ ID NO: 5455 - protein, 9 aa, synthetic construct
  REGION 1..9: note = short peptide
MPMNVADLI

SEQ ID NO: 5456 - protein, 12 aa, synthetic construct
  REGION 1..12: note = short peptide
VSDPSSPQYGKY

SEQ ID NO: 5457 - protein, 9 aa, synthetic construct
  REGION 1..9: note = short peptide
KHAKGNLQL

SEQ ID NO: 5458 - protein, 9 aa, synthetic construct
  REGION 1..9: note = short peptide
NNSTMQVSF

SEQ ID NO: 5459 - protein, 9 aa, synthetic construct
  REGION 1..9: note = short peptide
KDIKKNKNV

SEQ ID NO: 5460 - protein, 10 aa, synthetic construct
  REGION 1..10: note = short peptide
KMPKVKMPKF

SEQ ID NO: 5461 - protein, 9 aa, synthetic construct
  REGION 1..9: note = short peptide
IPAGEEKAL

SEQ ID NO: 5462 - protein, 8 aa, synthetic construct
  REGION 1..8: note = short peptide
PRVLKQVH

SEQ ID NO: 5463 - protein, 11 aa, synthetic construct
  REGION 1..11: note = short peptide
PGRTGLAGAPG

SEQ ID NO: 5464 - protein, 15 aa, synthetic construct
  REGION 1..15: note = short peptide
PAILQSAALPFCPES

SEQ ID NO: 5465 - protein, 10 aa, synthetic construct
  REGION 1..10: note = short peptide
IVSGQPGTQK

SEQ ID NO: 5466 - protein, 9 aa, synthetic construct
  REGION 1..9: note = short peptide
LPTENVDKM

SEQ ID NO: 5467 - protein, 10 aa, synthetic construct
  REGION 1..10: note = short peptide
LQRLIGNESF

SEQ ID NO: 5468 - protein, 15 aa, synthetic construct
  REGION 1..15: note = short peptide
KMYFPDVEFDIKSPK

SEQ ID NO: 5469 - protein, 15 aa, synthetic construct
  REGION 1..15: note = short peptide
LQKKLVPFATELHER

SEQ ID NO: 5470 - protein, 10 aa, synthetic construct
  REGION 1..10: note = short peptide
IVEQDTMPPK

SEQ ID NO: 5471 - protein, 9 aa, synthetic construct
  REGION 1..9: note = short peptide
KSSAPGMTK

SEQ ID NO: 5472 - protein, 10 aa, synthetic construct
  REGION 1..10: note = short peptide
LQHAAAGKAF

SEQ ID NO: 5473 - protein, 9 aa, synthetic construct
  REGION 1..9: note = short peptide
VAAAARGPL

SEQ ID NO: 5474 - protein, 9 aa, synthetic construct
  REGION 1..9: note = short peptide
ITTSPITVR

SEQ ID NO: 5475 - protein, 12 aa, synthetic construct
  REGION 1..12: note = short peptide
KMEVISLQNEKA

SEQ ID NO: 5476 - protein, 12 aa, synthetic construct
  REGION 1..12: note = short peptide
NYVPMTPGTFDF

SEQ ID NO: 5477 - protein, 15 aa, synthetic construct
  REGION 1..15: note = short peptide
LRPYPKEEVGQYLKK

SEQ ID NO: 5478 - protein, 11 aa, synthetic construct
  REGION 1..11: note = short peptide
LRLLGGLGGRV

SEQ ID NO: 5479 - protein, 8 aa, synthetic construct
  REGION 1..8: note = short peptide
INGTAVVM

SEQ ID NO: 5480 - protein, 12 aa, synthetic construct
  REGION 1..12: note = short peptide
PAGAALLALGPR

SEQ ID NO: 5481 - protein, 9 aa, synthetic construct
  REGION 1..9: note = short peptide
INSSISSFK

SEQ ID NO: 5482 - protein, 15 aa, synthetic construct
  REGION 1..15: note = short peptide
LRKYGKKVQTEVLQK

SEQ ID NO: 5483 - protein, 8 aa, synthetic construct
  REGION 1..8: note = short peptide
PSIEQRLQ

SEQ ID NO: 5484 - protein, 11 aa, synthetic construct
  REGION 1..11: note = short peptide
LRKTGAAPAKA

SEQ ID NO: 5485 - protein, 12 aa, synthetic construct
  REGION 1..12: note = short peptide
KTLSPGKNGVVK

SEQ ID NO: 5486 - protein, 13 aa, synthetic construct
  REGION 1..13: note = short peptide
ITPDLESGTKLWH

SEQ ID NO: 5487 - protein, 8 aa, synthetic construct
  REGION 1..8: note = short peptide
KNSSVEAF

SEQ ID NO: 5488 - protein, 14 aa, synthetic construct
  REGION 1..14: note = short peptide
PQRASTPQPAPAGV

SEQ ID NO: 5489 - protein, 10 aa, synthetic construct
  REGION 1..10: note = short peptide
APRKQLATKA

SEQ ID NO: 5490 - protein, 9 aa, synthetic construct
  REGION 1..9: note = short peptide
PQEEALQRL

SEQ ID NO: 5491 - protein, 9 aa, synthetic construct
  REGION 1..9: note = short peptide
ISTPVIRTF

SEQ ID NO: 5492 - protein, 9 aa, synthetic construct
  REGION 1..9: note = short peptide
VAKMKKMEM

SEQ ID NO: 5493 - protein, 10 aa, synthetic construct
  REGION 1..10: note = short peptide
LPMKVNPYSV

SEQ ID NO: 5494 - protein, 8 aa, synthetic construct
  REGION 1..8: note = short peptide
KNSIHEKF

SEQ ID NO: 5495 - protein, 11 aa, synthetic construct
  REGION 1..11: note = short peptide
KMQYATGPLLK

SEQ ID NO: 5496 - protein, 9 aa, synthetic construct
  REGION 1..9: note = short peptide
VAKMKKMEM

SEQ ID NO: 5497 - protein, 13 aa, synthetic construct
  REGION 1..13: note = short peptide
AMIPAKEAKDMLY

SEQ ID NO: 5498 - protein, 15 aa, synthetic construct
  REGION 1..15: note = short peptide
PFGGASHAKGIVLEK

SEQ ID NO: 5499 - protein, 10 aa, synthetic construct
  REGION 1..10: note = short peptide
LPVDDFNELL

SEQ ID NO: 5500 - protein, 9 aa, synthetic construct
  REGION 1..9: note = short peptide
PPTEQLLKF

SEQ ID NO: 5501 - protein, 14 aa, synthetic construct
  REGION 1..14: note = short peptide
YSVNVDYSKLKKER

SEQ ID NO: 5502 - protein, 14 aa, synthetic construct
  REGION 1..14: note = short peptide
TWGPFPVRPVNPGN

SEQ ID NO: 5503 - protein, 11 aa, synthetic construct
  REGION 1..11: note = short peptide
AAKVALTKRAD

SEQ ID NO: 5504 - protein, 9 aa, synthetic construct
  REGION 1..9: note = short peptide
IPLYLKGGI

SEQ ID NO: 5505 - protein, 9 aa, synthetic construct
  REGION 1..9: note = short peptide
PFLDIQKRF

SEQ ID NO: 5506 - protein, 9 aa, synthetic construct
  REGION 1..9: note = short peptide
APRIESKSM

SEQ ID NO: 5507 - protein, 11 aa, synthetic construct
  REGION 1..11: note = short peptide
LDLDVLRGHPP

SEQ ID NO: 5508 - protein, 9 aa, synthetic construct
  REGION 1..9: note = short peptide
APIRLPHTA

SEQ ID NO: 5509 - protein, 9 aa, synthetic construct
  REGION 1..9: note = short peptide
TVRPSGPPL

SEQ ID NO: 5510 - protein, 9 aa, synthetic construct
  REGION 1..9: note = short peptide
KSDGSFIGY

SEQ ID NO: 5511 - protein, 9 aa, synthetic construct
  REGION 1..9: note = short peptide
KMVWRINPA

SEQ ID NO: 5512 - protein, 12 aa, synthetic construct
  REGION 1..12: note = short peptide
AADAKKQAEESM

SEQ ID NO: 5513 - protein, 8 aa, synthetic construct
  REGION 1..8: note = short peptide
APGKPASA

SEQ ID NO: 5514 - protein, 11 aa, synthetic construct
  REGION 1..11: note = short peptide
YSECQNAAQIY

SEQ ID NO: 5515 - protein, 11 aa, synthetic construct
  REGION 1..11: note = short peptide
PPLNLSYPGAY

SEQ ID NO: 5516 - protein, 10 aa, synthetic construct
  REGION 1..10: note = short peptide
ITISMILCVP

SEQ ID NO: 5517 - protein, 12 aa, synthetic construct
  REGION 1..12: note = short peptide
APGPLCWGALAA

SEQ ID NO: 5518 - protein, 9 aa, synthetic construct
  REGION 1..9: note = short peptide
AAMPGFIAK

SEQ ID NO: 5519 - protein, 14 aa, synthetic construct
  REGION 1..14: note = short peptide
PDYDALDVANKIGI

SEQ ID NO: 5520 - protein, 9 aa, synthetic construct
  REGION 1..9: note = short peptide
VARKDLIVM

SEQ ID NO: 5521 - protein, 11 aa, synthetic construct
  REGION 1..11: note = short peptide
APRKQLATKAA

SEQ ID NO: 5522 - protein, 11 aa, synthetic construct
  REGION 1..11: note = short peptide
AALGGDGLRLL

SEQ ID NO: 5523 - protein, 9 aa, synthetic construct
  REGION 1..9: note = short peptide
VANPLLTAV

SEQ ID NO: 5524 - protein, 9 aa, synthetic construct
  REGION 1..9: note = short peptide
YTDPEVFKY

SEQ ID NO: 5525 - protein, 9 aa, synthetic construct
  REGION 1..9: note = short peptide
VEAKQPNSA

SEQ ID NO: 5526 - protein, 8 aa, synthetic construct
  REGION 1..8: note = short peptide
LSLRRMVI

SEQ ID NO: 5527 - protein, 10 aa, synthetic construct
  REGION 1..10: note = short peptide
VFSEPRAVFY

SEQ ID NO: 5528 - protein, 9 aa, synthetic construct
  REGION 1..9: note = short peptide
PNPLKLSSL

SEQ ID NO: 5529 - protein, 9 aa, synthetic construct
  REGION 1..9: note = short peptide
KAMDYDLLL

SEQ ID NO: 5530 - protein, 10 aa, synthetic construct
  REGION 1..10: note = short peptide
KALLHIFSGK

SEQ ID NO: 5531 - protein, 9 aa, synthetic construct
  REGION 1..9: note = short peptide
VFREATTDF

SEQ ID NO: 5532 - protein, 10 aa, synthetic construct
  REGION 1..10: note = short peptide
KALLGKGAQV

SEQ ID NO: 5533 - protein, 13 aa, synthetic construct
  REGION 1..13: note = short peptide
ANKGPSYGMSREV

SEQ ID NO: 5534 - protein, 9 aa, synthetic construct
  REGION 1..9: note = short peptide
TVICCLLAF

SEQ ID NO: 5535 - protein, 9 aa, synthetic construct
  REGION 1..9: note = short peptide
PNSSLLIRH

SEQ ID NO: 5536 - protein, 9 aa, synthetic construct
  REGION 1..9: note = short peptide
NSIGRGAGF

SEQ ID NO: 5537 - protein, 9 aa, synthetic construct
  REGION 1..9: note = short peptide
LPSEIEVKY

SEQ ID NO: 5538 - protein, 9 aa, synthetic construct
  REGION 1..9: note = short peptide
LNDPNPMKY

SEQ ID NO: 5539 - protein, 11 aa, synthetic construct
  REGION 1..11: note = short peptide
NSIGRGAGFER

SEQ ID NO: 5540 - protein, 9 aa, synthetic construct
  REGION 1..9: note = short peptide
YYQGGGGRY

SEQ ID NO: 5541 - protein, 10 aa, synthetic construct
  REGION 1..10: note = short peptide
PPAQGGGKEM

SEQ ID NO: 5542 - protein, 9 aa, synthetic construct
  REGION 1..9: note = short peptide
AAFAYTVKY

SEQ ID NO: 5543 - protein, 9 aa, synthetic construct
  REGION 1..9: note = short peptide
KLSPPMLLK

SEQ ID NO: 5544 - protein, 11 aa, synthetic construct
  REGION 1..11: note = short peptide
AMKNSTKEFVR

SEQ ID NO: 5545 - protein, 8 aa, synthetic construct
  REGION 1..8: note = short peptide
IPVVHASI

SEQ ID NO: 5546 - protein, 10 aa, synthetic construct
  REGION 1..10: note = short peptide
KTKPILRATK

SEQ ID NO: 5547 - protein, 10 aa, synthetic construct
  REGION 1..10: note = short peptide
AQAPLRGTVM

SEQ ID NO: 5548 - protein, 8 aa, synthetic construct
  REGION 1..8: note = short peptide
VHIGPGIN

SEQ ID NO: 5549 - protein, 9 aa, synthetic construct
  REGION 1..9: note = short peptide
VHDSARPML

SEQ ID NO: 5550 - protein, 11 aa, synthetic construct
  REGION 1..11: note = short peptide
VGWEELRNATY

SEQ ID NO: 5551 - protein, 9 aa, synthetic construct
  REGION 1..9: note = short peptide
NPYDSVKKI

SEQ ID NO: 5552 - protein, 8 aa, synthetic construct
  REGION 1..8: note = short peptide
KANAKQRK

SEQ ID NO: 5553 - protein, 12 aa, synthetic construct
  REGION 1..12: note = short peptide
NQSEAGSHIIQR

SEQ ID NO: 5554 - protein, 15 aa, synthetic construct
  REGION 1..15: note = short peptide
YPYPRAPVFPGRGSY

SEQ ID NO: 5555 - protein, 10 aa, synthetic construct
  REGION 1..10: note = short peptide
LSHILEVLYR

SEQ ID NO: 5556 - protein, 12 aa, synthetic construct
  REGION 1..12: note = short peptide
TVIQQQNATSQR

SEQ ID NO: 5557 - protein, 11 aa, synthetic construct
  REGION 1..11: note = short peptide
NTVGLGLPMSR

SEQ ID NO: 5558 - protein, 15 aa, synthetic construct
  REGION 1..15: note = short peptide
KSTGGKAPRKQLATK

SEQ ID NO: 5559 - protein, 9 aa, synthetic construct
  REGION 1..9: note = short peptide
LNRNVQVTL

SEQ ID NO: 5560 - protein, 9 aa, synthetic construct
  REGION 1..9: note = short peptide
LEKSNGTSA

SEQ ID NO: 5561 - protein, 11 aa, synthetic construct
  REGION 1..11: note = short peptide
APVSGAGNHSY

SEQ ID NO: 5562 - protein, 9 aa, synthetic construct
  REGION 1..9: note = short peptide
LNVGGSLYY

SEQ ID NO: 5563 - protein, 11 aa, synthetic construct
  REGION 1..11: note = short peptide
KADYVTAAGKI

SEQ ID NO: 5564 - protein, 9 aa, synthetic construct
  REGION 1..9: note = short peptide
NVAKTKNNL

SEQ ID NO: 5565 - protein, 9 aa, synthetic construct
  REGION 1..9: note = short peptide
ILYGRMKNK

SEQ ID NO: 5566 - protein, 9 aa, synthetic construct
  REGION 1..9: note = short peptide
LPAANFTRY

SEQ ID NO: 5567 - protein, 12 aa, synthetic construct
  REGION 1..12: note = short peptide
LPAGPRGMGTAL

SEQ ID NO: 5568 - protein, 15 aa, synthetic construct
  REGION 1..15: note = short peptide
PPFFADQPIQIYEKI

SEQ ID NO: 5569 - protein, 9 aa, synthetic construct
  REGION 1..9: note = short peptide
VENNLILKM

SEQ ID NO: 5570 - protein, 9 aa, synthetic construct
  REGION 1..9: note = short peptide
KNISHVHTM

SEQ ID NO: 5571 - protein, 9 aa, synthetic construct
  REGION 1..9: note = short peptide
LPANKTVAL

SEQ ID NO: 5572 - protein, 9 aa, synthetic construct
  REGION 1..9: note = short peptide
PKDSVLDPN

SEQ ID NO: 5573 - protein, 9 aa, synthetic construct
  REGION 1..9: note = short peptide
NWVFGEVLC

SEQ ID NO: 5574 - protein, 8 aa, synthetic construct
  REGION 1..8: note = short peptide
KAAIVFQK

SEQ ID NO: 5575 - protein, 9 aa, synthetic construct
  REGION 1..9: note = short peptide
APMPPIIHA

SEQ ID NO: 5576 - protein, 12 aa, synthetic construct
  REGION 1..12: note = short peptide
APDISPTLKPSI

SEQ ID NO: 5577 - protein, 10 aa, synthetic construct
  REGION 1..10: note = short peptide
APKANATIEV

SEQ ID NO: 5578 - protein, 10 aa, synthetic construct
  REGION 1..10: note = short peptide
PTNTTYVVQY

SEQ ID NO: 5579 - protein, 9 aa, synthetic construct
  REGION 1..9: note = short peptide
KAFRYPSSL

SEQ ID NO: 5580 - protein, 12 aa, synthetic construct
  REGION 1..12: note = short peptide
KLVTSKGDKELR

SEQ ID NO: 5581 - protein, 12 aa, synthetic construct
  REGION 1..12: note = short peptide
KAKAAQVKAKAK

SEQ ID NO: 5582 - protein, 12 aa, synthetic construct
  REGION 1..12: note = short peptide
VFHTLGQYFQKL

SEQ ID NO: 5583 - protein, 9 aa, synthetic construct
  REGION 1..9: note = short peptide
LNIIPLIPP

SEQ ID NO: 5584 - protein, 9 aa, synthetic construct
  REGION 1..9: note = short peptide
KAFSRASTL

SEQ ID NO: 5585 - protein, 9 aa, synthetic construct
  REGION 1..9: note = short peptide
LNRKGGGNL

SEQ ID NO: 5586 - protein, 9 aa, synthetic construct
  REGION 1..9: note = short peptide
ILSGVVTKM

SEQ ID NO: 5587 - protein, 11 aa, synthetic construct
  REGION 1..11: note = short peptide
LSEDSYKDSTL

SEQ ID NO: 5588 - protein, 10 aa, synthetic construct
  REGION 1..10: note = short peptide
APYGNPKNMA

SEQ ID NO: 5589 - protein, 10 aa, synthetic construct
  REGION 1..10: note = short peptide
NTLPVRNVLD

SEQ ID NO: 5590 - protein, 11 aa, synthetic construct
  REGION 1..11: note = short peptide
RIWGDCTVRKK

SEQ ID NO: 5591 - protein, 9 aa, synthetic construct
  REGION 1..9: note = short peptide
RTKQICKSW

SEQ ID NO: 5592 - protein, 10 aa, synthetic construct
  REGION 1..10: note = short peptide
RIWQCHSHGW

SEQ ID NO: 5593 - protein, 10 aa, synthetic construct
  REGION 1..10: note = short peptide
RPLPLTSVCY

SEQ ID NO: 5594 - protein, 9 aa, synthetic construct
  REGION 1..9: note = short peptide
AAGQLCLLY

SEQ ID NO: 5595 - protein, 9 aa, synthetic construct
  REGION 1..9: note = short peptide
RQKKLFCRY

SEQ ID NO: 5596 - protein, 9 aa, synthetic construct
  REGION 1..9: note = short peptide
LPARFFSCM

SEQ ID NO: 5597 - protein, 9 aa, synthetic construct
  REGION 1..9: note = short peptide
RPGRPCTRL

SEQ ID NO: 5598 - protein, 9 aa, synthetic construct
  REGION 1..9: note = short peptide
LPACYQHLM

SEQ ID NO: 5599 - protein, 10 aa, synthetic construct
  REGION 1..10: note = short peptide
AAPQTLALLK

SEQ ID NO: 5600 - protein, 10 aa, synthetic construct
  REGION 1..10: note = short peptide
STSHPCFVSR

SEQ ID NO: 5601 - protein, 9 aa, synthetic construct
  REGION 1..9: note = short peptide
RPHHSIRCM

SEQ ID NO: 5602 - protein, 9 aa, synthetic construct
  REGION 1..9: note = short peptide
AHNLCYTTL

SEQ ID NO: 5603 - protein, 9 aa, synthetic construct
  REGION 1..9: note = short peptide
RLLSTYICK

SEQ ID NO: 5604 - protein, 11 aa, synthetic construct
  REGION 1..11: note = short peptide
REDLSRLVNCL

SEQ ID NO: 5605 - protein, 10 aa, synthetic construct
  REGION 1..10: note = short peptide
RPSSINYMVA

SEQ ID NO: 5606 - protein, 14 aa, synthetic construct
  REGION 1..14: note = short peptide
YVYYKIDCNLLEFK

SEQ ID NO: 5607 - protein, 11 aa, synthetic construct
  REGION 1..11: note = short peptide
LPAPVPVCVRF

SEQ ID NO: 5608 - protein, 10 aa, synthetic construct
  REGION 1..10: note = short peptide
KVYNGILEKS

SEQ ID NO: 5609 - protein, 9 aa, synthetic construct
  REGION 1..9: note = short peptide
KVYLPTNCY

SEQ ID NO: 5610 - protein, 9 aa, synthetic construct
  REGION 1..9: note = short peptide
AHNACVLTI

SEQ ID NO: 5611 - protein, 9 aa, synthetic construct
  REGION 1..9: note = short peptide
LGTACGKYY

SEQ ID NO: 5612 - protein, 10 aa, synthetic construct
  REGION 1..10: note = short peptide
RVNQPDRECK

SEQ ID NO: 5613 - protein, 10 aa, synthetic construct
  REGION 1..10: note = short peptide
RVASNVCWAF

SEQ ID NO: 5614 - protein, 9 aa, synthetic construct
  REGION 1..9: note = short peptide
SCRGILVVY

SEQ ID NO: 5615 - protein, 11 aa, synthetic construct
  REGION 1..11: note = short peptide
KVQYPQSQACK

SEQ ID NO: 5616 - protein, 8 aa, synthetic construct
  REGION 1..8: note = short peptide
RDLCGIVA

SEQ ID NO: 5617 - protein, 9 aa, synthetic construct
  REGION 1..9: note = short peptide
SDAPCVVKV

SEQ ID NO: 5618 - protein, 9 aa, synthetic construct
  REGION 1..9: note = short peptide
SDIVRVCFF

SEQ ID NO: 5619 - protein, 9 aa, synthetic construct
  REGION 1..9: note = short peptide
SDFGLCTGL

SEQ ID NO: 5620 - protein, 9 aa, synthetic construct
  REGION 1..9: note = short peptide
AACSQYFKK

SEQ ID NO: 5621 - protein, 9 aa, synthetic construct
  REGION 1..9: note = short peptide
SEMAPVCAV

SEQ ID NO: 5622 - protein, 11 aa, synthetic construct
  REGION 1..11: note = short peptide
SENPVRYGQCW

SEQ ID NO: 5623 - protein, 9 aa, synthetic construct
  REGION 1..9: note = short peptide
AHFSPQLCI

SEQ ID NO: 5624 - protein, 12 aa, synthetic construct
  REGION 1..12: note = short peptide
SCGKDGFHIRVR

SEQ ID NO: 5625 - protein, 9 aa, synthetic construct
  REGION 1..9: note = short peptide
LPASCLRSA

SEQ ID NO: 5626 - protein, 9 aa, synthetic construct
  REGION 1..9: note = short peptide
RKMQGLMFR

SEQ ID NO: 5627 - protein, 9 aa, synthetic construct
  REGION 1..9: note = short peptide
REIICSVAF

SEQ ID NO: 5628 - protein, 13 aa, synthetic construct
  REGION 1..13: note = short peptide
SSRHSGIGHGQAS

SEQ ID NO: 5629 - protein, 9 aa, synthetic construct
  REGION 1..9: note = short peptide
RLCEGSSFR

SEQ ID NO: 5630 - protein, 9 aa, synthetic construct
  REGION 1..9: note = short peptide
AHLDAVTCL

SEQ ID NO: 5631 - protein, 10 aa, synthetic construct
  REGION 1..10: note = short peptide
RLKCASLQKF

SEQ ID NO: 5632 - protein, 9 aa, synthetic construct
  REGION 1..9: note = short peptide
LPCLEHVSL

SEQ ID NO: 5633 - protein, 9 aa, synthetic construct
  REGION 1..9: note = short peptide
LPCPDSQKL

SEQ ID NO: 5634 - protein, 9 aa, synthetic construct
  REGION 1..9: note = short peptide
RLCENIAGH

SEQ ID NO: 5635 - protein, 10 aa, synthetic construct
  REGION 1..10: note = short peptide
RINCPVYITK

SEQ ID NO: 5636 - protein, 9 aa, synthetic construct
  REGION 1..9: note = short peptide
RYKCSSDHW

SEQ ID NO: 5637 - protein, 10 aa, synthetic construct
  REGION 1..10: note = short peptide
LMIDCQPPAM

SEQ ID NO: 5638 - protein, 9 aa, synthetic construct
  REGION 1..9: note = short peptide
ALCALVYRL

SEQ ID NO: 5639 - protein, 11 aa, synthetic construct
  REGION 1..11: note = short peptide
RESATITCLVT

SEQ ID NO: 5640 - protein, 9 aa, synthetic construct
  REGION 1..9: note = short peptide
REQVLKVCA

SEQ ID NO: 5641 - protein, 11 aa, synthetic construct
  REGION 1..11: note = short peptide
ALCPGDLIQAI

SEQ ID NO: 5642 - protein, 8 aa, synthetic construct
  REGION 1..8: note = short peptide
KYGCVDYW

SEQ ID NO: 5643 - protein, 9 aa, synthetic construct
  REGION 1..9: note = short peptide
SEAGTGFCF

SEQ ID NO: 5644 - protein, 10 aa, synthetic construct
  REGION 1..10: note = short peptide
ALCPGLGPQK

SEQ ID NO: 5645 - protein, 10 aa, synthetic construct
  REGION 1..10: note = short peptide
RTYSVGVCTF

SEQ ID NO: 5646 - protein, 9 aa, synthetic construct
  REGION 1..9: note = short peptide
RLSPSRECW

SEQ ID NO: 5647 - protein, 8 aa, synthetic construct
  REGION 1..8: note = short peptide
YVNCGHVT

SEQ ID NO: 5648 - protein, 13 aa, synthetic construct
  REGION 1..13: note = short peptide
RVRSAEEGGFTCR

SEQ ID NO: 5649 - protein, 9 aa, synthetic construct
  REGION 1..9: note = short peptide
STCNDLIAK

SEQ ID NO: 5650 - protein, 10 aa, synthetic construct
  REGION 1..10: note = short peptide
SEEGCPKRGF

SEQ ID NO: 5651 - protein, 10 aa, synthetic construct
  REGION 1..10: note = short peptide
ALCGKSFIRK

SEQ ID NO: 5652 - protein, 9 aa, synthetic construct
  REGION 1..9: note = short peptide
SECGKLFSF

SEQ ID NO: 5653 - protein, 9 aa, synthetic construct
  REGION 1..9: note = short peptide
LLPGNARCL

SEQ ID NO: 5654 - protein, 9 aa, synthetic construct
  REGION 1..9: note = short peptide
LLQLKVKCL

SEQ ID NO: 5655 - protein, 9 aa, synthetic construct
  REGION 1..9: note = short peptide
RLVDGVTEC

SEQ ID NO: 5656 - protein, 9 aa, synthetic construct
  REGION 1..9: note = short peptide
ALCHFPFLY

SEQ ID NO: 5657 - protein, 10 aa, synthetic construct
  REGION 1..10: note = short peptide
LDSCTKLLQK

SEQ ID NO: 5658 - protein, 8 aa, synthetic construct
  REGION 1..8: note = short peptide
ADLKQFCL

SEQ ID NO: 5659 - protein, 10 aa, synthetic construct
  REGION 1..10: note = short peptide
AIIETNCIYR

SEQ ID NO: 5660 - protein, 9 aa, synthetic construct
  REGION 1..9: note = short peptide
RVTLTRCFY

SEQ ID NO: 5661 - protein, 8 aa, synthetic construct
  REGION 1..8: note = short peptide
LMELPDQY

SEQ ID NO: 5662 - protein, 9 aa, synthetic construct
  REGION 1..9: note = short peptide
SDYIRCIAV

SEQ ID NO: 5663 - protein, 11 aa, synthetic construct
  REGION 1..11: note = short peptide
SSYTPKDCTSR

SEQ ID NO: 5664 - protein, 9 aa, synthetic construct
  REGION 1..9: note = short peptide
STCISPNSK

SEQ ID NO: 5665 - protein, 9 aa, synthetic construct
  REGION 1..9: note = short peptide
LLCDIVLHV

SEQ ID NO: 5666 - protein, 9 aa, synthetic construct
  REGION 1..9: note = short peptide
LNHPHIIKL

SEQ ID NO: 5667 - protein, 11 aa, synthetic construct
  REGION 1..11: note = short peptide
LNIINSSITTK

SEQ ID NO: 5668 - protein, 9 aa, synthetic construct
  REGION 1..9: note = short peptide
YPVCKFPSL

SEQ ID NO: 5669 - protein, 10 aa, synthetic construct
  REGION 1..10: note = short peptide
REKKFFCALL

SEQ ID NO: 5670 - protein, 8 aa, synthetic construct
  REGION 1..8: note = short peptide
SSPCHIEM

SEQ ID NO: 5671 - protein, 10 aa, synthetic construct
  REGION 1..10: note = short peptide
STCTYVGAAK

SEQ ID NO: 5672 - protein, 9 aa, synthetic construct
  REGION 1..9: note = short peptide
ALCAESVNK

SEQ ID NO: 5673 - protein, 9 aa, synthetic construct
  REGION 1..9: note = short peptide
LERPQSVCL

SEQ ID NO: 5674 - protein, 9 aa, synthetic construct
  REGION 1..9: note = short peptide
RELAHCQKV

SEQ ID NO: 5675 - protein, 9 aa, synthetic construct
  REGION 1..9: note = short peptide
AIMPYCLHL

SEQ ID NO: 5676 - protein, 9 aa, synthetic construct
  REGION 1..9: note = short peptide
RVQRDRQCL

SEQ ID NO: 5677 - protein, 14 aa, synthetic construct
  REGION 1..14: note = short peptide
AAEVISNARENIQR

SEQ ID NO: 5678 - protein, 9 aa, synthetic construct
  REGION 1..9: note = short peptide
LMSCTRSVY

SEQ ID NO: 5679 - protein, 9 aa, synthetic construct
  REGION 1..9: note = short peptide
LMSECLLYY

SEQ ID NO: 5680 - protein, 9 aa, synthetic construct
  REGION 1..9: note = short peptide
RIICSHEHY

SEQ ID NO: 5681 - protein, 9 aa, synthetic construct
  REGION 1..9: note = short peptide
SEGCGAPEL

SEQ ID NO: 5682 - protein, 9 aa, synthetic construct
  REGION 1..9: note = short peptide
RELESVCVV

SEQ ID NO: 5683 - protein, 9 aa, synthetic construct
  REGION 1..9: note = short peptide
RELCQQIHA

SEQ ID NO: 5684 - protein, 9 aa, synthetic construct
  REGION 1..9: note = short peptide
RILCSHEHY

SEQ ID NO: 5685 - protein, 9 aa, synthetic construct
  REGION 1..9: note = short peptide
RELAHCQKV

SEQ ID NO: 5686 - protein, 10 aa, synthetic construct
  REGION 1..10: note = short peptide
LMVNVAHDVL

SEQ ID NO: 5687 - protein, 9 aa, synthetic construct
  REGION 1..9: note = short peptide
ALCSRLLEY

SEQ ID NO: 5688 - protein, 9 aa, synthetic construct
  REGION 1..9: note = short peptide
RSFCKPQEL

SEQ ID NO: 5689 - protein, 8 aa, synthetic construct
  REGION 1..8: note = short peptide
RDAVKKCF

SEQ ID NO: 5690 - protein, 9 aa, synthetic construct
  REGION 1..9: note = short peptide
AEFPCRILL

SEQ ID NO: 5691 - protein, 9 aa, synthetic construct
  REGION 1..9: note = short peptide
RRNKTHTLC

SEQ ID NO: 5692 - protein, 9 aa, synthetic construct
  REGION 1..9: note = short peptide
NTAVILTNR

SEQ ID NO: 5693 - protein, 11 aa, synthetic construct
  REGION 1..11: note = short peptide
NTCIVDDSFKY

SEQ ID NO: 5694 - protein, 11 aa, synthetic construct
  REGION 1..11: note = short peptide
RVLGPCSDILK

SEQ ID NO: 5695 - protein, 9 aa, synthetic construct
  REGION 1..9: note = short peptide
SICGKAFSH

SEQ ID NO: 5696 - protein, 12 aa, synthetic construct
  REGION 1..12: note = short peptide
NSDCYFGNGSAY

SEQ ID NO: 5697 - protein, 11 aa, synthetic construct
  REGION 1..11: note = short peptide
NVVRSKGLSVF

SEQ ID NO: 5698 - protein, 11 aa, synthetic construct
  REGION 1..11: note = short peptide
NYLCPAIINQI

SEQ ID NO: 5699 - protein, 12 aa, synthetic construct
  REGION 1..12: note = short peptide
RRLIVIGCGTSY

SEQ ID NO: 5700 - protein, 8 aa, synthetic construct
  REGION 1..8: note = short peptide
SPGCQPPA

SEQ ID NO: 5701 - protein, 9 aa, synthetic construct
  REGION 1..9: note = short peptide
MLFPGCISL

SEQ ID NO: 5702 - protein, 9 aa, synthetic construct
  REGION 1..9: note = short peptide
SPHGEPFCL

SEQ ID NO: 5703 - protein, 9 aa, synthetic construct
  REGION 1..9: note = short peptide
SHSCSSTQF

SEQ ID NO: 5704 - protein, 14 aa, synthetic construct
  REGION 1..14: note = short peptide
RSIQFVDWCPTGFK

SEQ ID NO: 5705 - protein, 9 aa, synthetic construct
  REGION 1..9: note = short peptide
SHSNPEVLL

SEQ ID NO: 5706 - protein, 10 aa, synthetic construct
  REGION 1..10: note = short peptide
NVSRPPVTLR

SEQ ID NO: 5707 - protein, 9 aa, synthetic construct
  REGION 1..9: note = short peptide
SHYTCEVTW

SEQ ID NO: 5708 - protein, 9 aa, synthetic construct
  REGION 1..9: note = short peptide
NVHEVKNHK

SEQ ID NO: 5709 - protein, 11 aa, synthetic construct
  REGION 1..11: note = short peptide
SNSAQGSDVSL

SEQ ID NO: 5710 - protein, 9 aa, synthetic construct
  REGION 1..9: note = short peptide
MHYDAEIIL

SEQ ID NO: 5711 - protein, 9 aa, synthetic construct
  REGION 1..9: note = short peptide
RRSRMLLCF

SEQ ID NO: 5712 - protein, 12 aa, synthetic construct
  REGION 1..12: note = short peptide
NQSEAGSHTLQR

SEQ ID NO: 5713 - protein, 10 aa, synthetic construct
  REGION 1..10: note = short peptide
MPNQHACKLG

SEQ ID NO: 5714 - protein, 9 aa, synthetic construct
  REGION 1..9: note = short peptide
SLLPACIKL

SEQ ID NO: 5715 - protein, 9 aa, synthetic construct
  REGION 1..9: note = short peptide
AENKGTCKF

SEQ ID NO: 5716 - protein, 9 aa, synthetic construct
  REGION 1..9: note = short peptide
NHSCENSEL

SEQ ID NO: 5717 - protein, 9 aa, synthetic construct
  REGION 1..9: note = short peptide
SLCGLKLEV

SEQ ID NO: 5718 - protein, 8 aa, synthetic construct
  REGION 1..8: note = short peptide
NHSGSPKL

SEQ ID NO: 5719 - protein, 9 aa, synthetic construct
  REGION 1..9: note = short peptide
SLLDCSPYL

SEQ ID NO: 5720 - protein, 9 aa, synthetic construct
  REGION 1..9: note = short peptide
NHSTEHQCM

SEQ ID NO: 5721 - protein, 8 aa, synthetic construct
  REGION 1..8: note = short peptide
NHTKAVQL

SEQ ID NO: 5722 - protein, 11 aa, synthetic construct
  REGION 1..11: note = short peptide
RVLGPCSEILK

SEQ ID NO: 5723 - protein, 10 aa, synthetic construct
  REGION 1..10: note = short peptide
SLMENGKIKV

SEQ ID NO: 5724 - protein, 13 aa, synthetic construct
  REGION 1..13: note = short peptide
YSDLASLACMSKY

SEQ ID NO: 5725 - protein, 8 aa, synthetic construct
  REGION 1..8: note = short peptide
NHSALESL

SEQ ID NO: 5726 - protein, 9 aa, synthetic construct
  REGION 1..9: note = short peptide
NHIKSSCSL

SEQ ID NO: 5727 - protein, 10 aa, synthetic construct
  REGION 1..10: note = short peptide
SLFPHAICLG

SEQ ID NO: 5728 - protein, 11 aa, synthetic construct
  REGION 1..11: note = short peptide
NEECPTITRTY

SEQ ID NO: 5729 - protein, 8 aa, synthetic construct
  REGION 1..8: note = short peptide
NEFKFQCI

SEQ ID NO: 5730 - protein, 9 aa, synthetic construct
  REGION 1..9: note = short peptide
NEGCPVEAL

SEQ ID NO: 5731 - protein, 11 aa, synthetic construct
  REGION 1..11: note = short peptide
NEGKCDLKEKW

SEQ ID NO: 5732 - protein, 8 aa, synthetic construct
  REGION 1..8: note = short peptide
NAVRLLVV

SEQ ID NO: 5733 - protein, 9 aa, synthetic construct
  REGION 1..9: note = short peptide
NELVTLTCL

SEQ ID NO: 5734 - protein, 9 aa, synthetic construct
  REGION 1..9: note = short peptide
NENCSIVRI

SEQ ID NO: 5735 - protein, 10 aa, synthetic construct
  REGION 1..10: note = short peptide
NEQSPTRCTL

SEQ ID NO: 5736 - protein, 11 aa, synthetic construct
  REGION 1..11: note = short peptide
NIAGGFLVTQR

SEQ ID NO: 5737 - protein, 9 aa, synthetic construct
  REGION 1..9: note = short peptide
SLCEKAFSR

SEQ ID NO: 5738 - protein, 9 aa, synthetic construct
  REGION 1..9: note = short peptide
NLVEHILKY

SEQ ID NO: 5739 - protein, 10 aa, synthetic construct
  REGION 1..10: note = short peptide
SLSNCSIGKK

SEQ ID NO: 5740 - protein, 10 aa, synthetic construct
  REGION 1..10: note = short peptide
SLANLTCDQL

SEQ ID NO: 5741 - protein, 9 aa, synthetic construct
  REGION 1..9: note = short peptide
SISGCPLYH

SEQ ID NO: 5742 - protein, 13 aa, synthetic construct
  REGION 1..13: note = short peptide
MPVEAKCINAVSF

SEQ ID NO: 5743 - protein, 11 aa, synthetic construct
  REGION 1..11: note = short peptide
NLVDRRLQVNR

SEQ ID NO: 5744 - protein, 9 aa, synthetic construct
  REGION 1..9: note = short peptide
NLKKLVEKF

SEQ ID NO: 5745 - protein, 10 aa, synthetic construct
  REGION 1..10: note = short peptide
NIIKIVGLQY

SEQ ID NO: 5746 - protein, 10 aa, synthetic construct
  REGION 1..10: note = short peptide
NIINSSITTK

SEQ ID NO: 5747 - protein, 8 aa, synthetic construct
  REGION 1..8: note = short peptide
SLNRADNI

SEQ ID NO: 5748 - protein, 11 aa, synthetic construct
  REGION 1..11: note = short peptide
SLPDLRCSLLL

SEQ ID NO: 5749 - protein, 9 aa, synthetic construct
  REGION 1..9: note = short peptide
SLCGKAFQR

SEQ ID NO: 5750 - protein, 11 aa, synthetic construct
  REGION 1..11: note = short peptide
AEIKEKICDYL

SEQ ID NO: 5751 - protein, 9 aa, synthetic construct
  REGION 1..9: note = short peptide
SPICPEERL

SEQ ID NO: 5752 - protein, 9 aa, synthetic construct
  REGION 1..9: note = short peptide
SEVLTCIKL

SEQ ID NO: 5753 - protein, 10 aa, synthetic construct
  REGION 1..10: note = short peptide
SEVGDGRACY

SEQ ID NO: 5754 - protein, 9 aa, synthetic construct
  REGION 1..9: note = short peptide
RRDALLHCL

SEQ ID NO: 5755 - protein, 9 aa, synthetic construct
  REGION 1..9: note = short peptide
SRDAVGVCL

SEQ ID NO: 5756 - protein, 9 aa, synthetic construct
  REGION 1..9: note = short peptide
QSCPDPAVY

SEQ ID NO: 5757 - protein, 13 aa, synthetic construct
  REGION 1..13: note = short peptide
AFLPLCFVKSTQY

SEQ ID NO: 5758 - protein, 8 aa, synthetic construct
  REGION 1..8: note = short peptide
LPQPVAPA

SEQ ID NO: 5759 - protein, 10 aa, synthetic construct
  REGION 1..10: note = short peptide
LPQPPEGQCY

SEQ ID NO: 5760 - protein, 10 aa, synthetic construct
  REGION 1..10: note = short peptide
LPQPCPEEHL

SEQ ID NO: 5761 - protein, 9 aa, synthetic construct
  REGION 1..9: note = short peptide
QPVLPSPAC

SEQ ID NO: 5762 - protein, 9 aa, synthetic construct
  REGION 1..9: note = short peptide
LPTVVICNL

SEQ ID NO: 5763 - protein, 9 aa, synthetic construct
  REGION 1..9: note = short peptide
QLEIFHLVM

SEQ ID NO: 5764 - protein, 9 aa, synthetic construct
  REGION 1..9: note = short peptide
QLHSKKFCL

SEQ ID NO: 5765 - protein, 9 aa, synthetic construct
  REGION 1..9: note = short peptide
AFPLICAHF

SEQ ID NO: 5766 - protein, 9 aa, synthetic construct
  REGION 1..9: note = short peptide
QLLKVLQRL

SEQ ID NO: 5767 - protein, 10 aa, synthetic construct
  REGION 1..10: note = short peptide
LPYNQPGTCY

SEQ ID NO: 5768 - protein, 8 aa, synthetic construct
  REGION 1..8: note = short peptide
QNLSFGAT

SEQ ID NO: 5769 - protein, 10 aa, synthetic construct
  REGION 1..10: note = short peptide
QPASGGPCPA

SEQ ID NO: 5770 - protein, 9 aa, synthetic construct
  REGION 1..9: note = short peptide
LPVGSQCSV

SEQ ID NO: 5771 - protein, 11 aa, synthetic construct
  REGION 1..11: note = short peptide
QPFPTCQALVY

SEQ ID NO: 5772 - protein, 10 aa, synthetic construct
  REGION 1..10: note = short peptide
SRFHADSVCK

SEQ ID NO: 5773 - protein, 10 aa, synthetic construct
  REGION 1..10: note = short peptide
LPNPQSRVCL

SEQ ID NO: 5774 - protein, 9 aa, synthetic construct
  REGION 1..9: note = short peptide
YTSHITCRW

SEQ ID NO: 5775 - protein, 10 aa, synthetic construct
  REGION 1..10: note = short peptide
RQVQSLTCEV

SEQ ID NO: 5776 - protein, 8 aa, synthetic construct
  REGION 1..8: note = short peptide
LPIEACVM

SEQ ID NO: 5777 - protein, 10 aa, synthetic construct
  REGION 1..10: note = short peptide
LPFSCTKEEL

SEQ ID NO: 5778 - protein, 12 aa, synthetic construct
  REGION 1..12: note = short peptide
QVSIPDVNVNLK

SEQ ID NO: 5779 - protein, 10 aa, synthetic construct
  REGION 1..10: note = short peptide
LPIPVICVTY

SEQ ID NO: 5780 - protein, 15 aa, synthetic construct
  REGION 1..15: note = short peptide
RVNDVCTNGQDLIKK

SEQ ID NO: 5781 - protein, 8 aa, synthetic construct
  REGION 1..8: note = short peptide
QTGGKLYL

SEQ ID NO: 5782 - protein, 9 aa, synthetic construct
  REGION 1..9: note = short peptide
LPLPEYCAL

SEQ ID NO: 5783 - protein, 10 aa, synthetic construct
  REGION 1..10: note = short peptide
SESTAALGCL

SEQ ID NO: 5784 - protein, 12 aa, synthetic construct
  REGION 1..12: note = short peptide
QVADLKNSLGSF

SEQ ID NO: 5785 - protein, 12 aa, synthetic construct
  REGION 1..12: note = short peptide
QVANSAFVERVR

SEQ ID NO: 5786 - protein, 9 aa, synthetic construct
  REGION 1..9: note = short peptide
QVARQQSHF

SEQ ID NO: 5787 - protein, 10 aa, synthetic construct
  REGION 1..10: note = short peptide
AHCDLPELLL

SEQ ID NO: 5788 - protein, 10 aa, synthetic construct
  REGION 1..10: note = short peptide
QVIEVACGSY

SEQ ID NO: 5789 - protein, 10 aa, synthetic construct
  REGION 1..10: note = short peptide
RTFDPCKQLW

SEQ ID NO: 5790 - protein, 10 aa, synthetic construct
  REGION 1..10: note = short peptide
LPKETCLITF

SEQ ID NO: 5791 - protein, 9 aa, synthetic construct
  REGION 1..9: note = short peptide
QVIVAIPKL

SEQ ID NO: 5792 - protein, 10 aa, synthetic construct
  REGION 1..10: note = short peptide
QVLVGSYCVF

SEQ ID NO: 5793 - protein, 10 aa, synthetic construct
  REGION 1..10: note = short peptide
AAAGPSCALK

SEQ ID NO: 5794 - protein, 9 aa, synthetic construct
  REGION 1..9: note = short peptide
AFPLICAHF

SEQ ID NO: 5795 - protein, 9 aa, synthetic construct
  REGION 1..9: note = short peptide
LQKLVRIQL

SEQ ID NO: 5796 - protein, 8 aa, synthetic construct
  REGION 1..8: note = short peptide
SPQGLKVW

SEQ ID NO: 5797 - protein, 9 aa, synthetic construct
  REGION 1..9: note = short peptide
SHCTRHDHF

SEQ ID NO: 5798 - protein, 9 aa, synthetic construct
  REGION 1..9: note = short peptide
MAGCIQEAR

SEQ ID NO: 5799 - protein, 11 aa, synthetic construct
  REGION 1..11: note = short peptide
RRFTSGQCQVR

SEQ ID NO: 5800 - protein, 9 aa, synthetic construct
  REGION 1..9: note = short peptide
LQPPASPQL

SEQ ID NO: 5801 - protein, 10 aa, synthetic construct
  REGION 1..10: note = short peptide
SHCSSPATRF

SEQ ID NO: 5802 - protein, 9 aa, synthetic construct
  REGION 1..9: note = short peptide
PYCSLHLHL

SEQ ID NO: 5803 - protein, 9 aa, synthetic construct
  REGION 1..9: note = short peptide
AETGCKIMV

SEQ ID NO: 5804 - protein, 8 aa, synthetic construct
  REGION 1..8: note = short peptide
SHDSTVCL

SEQ ID NO: 5805 - protein, 9 aa, synthetic construct
  REGION 1..9: note = short peptide
MDLRLKHCL

SEQ ID NO: 5806 - protein, 9 aa, synthetic construct
  REGION 1..9: note = short peptide
PGQVISMAA

SEQ ID NO: 5807 - protein, 9 aa, synthetic construct
  REGION 1..9: note = short peptide
LVTLVNCQL

SEQ ID NO: 5808 - protein, 10 aa, synthetic construct
  REGION 1..10: note = short peptide
AEVRSKCEEL

SEQ ID NO: 5809 - protein, 11 aa, synthetic construct
  REGION 1..11: note = short peptide
RSQCDAIRVTK

SEQ ID NO: 5810 - protein, 9 aa, synthetic construct
  REGION 1..9: note = short peptide
RSSCPHVLK

SEQ ID NO: 5811 - protein, 9 aa, synthetic construct
  REGION 1..9: note = short peptide
QETPMEICL

SEQ ID NO: 5812 - protein, 9 aa, synthetic construct
  REGION 1..9: note = short peptide
AEAELKCVV

SEQ ID NO: 5813 - protein, 10 aa, synthetic construct
  REGION 1..10: note = short peptide
AEVRSKCEEL

SEQ ID NO: 5814 - protein, 11 aa, synthetic construct
  REGION 1..11: note = short peptide
AEVTARCIEQL

SEQ ID NO: 5815 - protein, 10 aa, synthetic construct
  REGION 1..10: note = short peptide
SEVRCSGQEL

SEQ ID NO: 5816 - protein, 9 aa, synthetic construct
  REGION 1..9: note = short peptide
QLCEVLQNK

SEQ ID NO: 5817 - protein, 10 aa, synthetic construct
  REGION 1..10: note = short peptide
QELGYGCLKF

SEQ ID NO: 5818 - protein, 9 aa, synthetic construct
  REGION 1..9: note = short peptide
SHAIPCYSL

SEQ ID NO: 5819 - protein, 10 aa, synthetic construct
  REGION 1..10: note = short peptide
LTECIRAGHY

SEQ ID NO: 5820 - protein, 12 aa, synthetic construct
  REGION 1..12: note = short peptide
QAASGFLLDPVR

SEQ ID NO: 5821 - protein, 8 aa, synthetic construct
  REGION 1..8: note = short peptide
LVLQTGAL

SEQ ID NO: 5822 - protein, 10 aa, synthetic construct
  REGION 1..10: note = short peptide
AEVECQRQDL

SEQ ID NO: 5823 - protein, 8 aa, synthetic construct
  REGION 1..8: note = short peptide
QCGKAFKR

SEQ ID NO: 5824 - protein, 10 aa, synthetic construct
  REGION 1..10: note = short peptide
AEVKGVCTEA

SEQ ID NO: 5825 - protein, 10 aa, synthetic construct
  REGION 1..10: note = short peptide
AEVKGVCTEA

SEQ ID NO: 5826 - protein, 14 aa, synthetic construct
  REGION 1..14: note = short peptide
LTEPYRGGCQAQDY

SEQ ID NO: 5827 - protein, 10 aa, synthetic construct
  REGION 1..10: note = short peptide
AEVLVKNSQP

SEQ ID NO: 5828 - protein, 9 aa, synthetic construct
  REGION 1..9: note = short peptide
AACASLLKK

SEQ ID NO: 5829 - protein, 8 aa, synthetic construct
  REGION 1..8: note = short peptide
CHAVHVAL

SEQ ID NO: 5830 - protein, 9 aa, synthetic construct
  REGION 1..9: note = short peptide
EHNRDCILL

SEQ ID NO: 5831 - protein, 9 aa, synthetic construct
  REGION 1..9: note = short peptide
HQRCLAHSL

SEQ ID NO: 5832 - protein, 9 aa, synthetic construct
  REGION 1..9: note = short peptide
TREAGCVAA

SEQ ID NO: 5833 - protein, 9 aa, synthetic construct
  REGION 1..9: note = short peptide
HQISFCQYF

SEQ ID NO: 5834 - protein, 9 aa, synthetic construct
  REGION 1..9: note = short peptide
TRHDCPVCL

SEQ ID NO: 5835 - protein, 11 aa, synthetic construct
  REGION 1..11: note = short peptide
APSEAEASCAA

SEQ ID NO: 5836 - protein, 9 aa, synthetic construct
  REGION 1..9: note = short peptide
APSGNYVAC

SEQ ID NO: 5837 - protein, 10 aa, synthetic construct
  REGION 1..10: note = short peptide
APSGNYVACG

SEQ ID NO: 5838 - protein, 10 aa, synthetic construct
  REGION 1..10: note = short peptide
HPVHADNCVL

SEQ ID NO: 5839 - protein, 9 aa, synthetic construct
  REGION 1..9: note = short peptide
EHQKCLDKL

SEQ ID NO: 5840 - protein, 9 aa, synthetic construct
  REGION 1..9: note = short peptide
EHSKQYRCL

SEQ ID NO: 5841 - protein, 12 aa, synthetic construct
  REGION 1..12: note = short peptide
HPIPAACGIYYF

SEQ ID NO: 5842 - protein, 11 aa, synthetic construct
  REGION 1..11: note = short peptide
HPIPAACGIYY

SEQ ID NO: 5843 - protein, 11 aa, synthetic construct
  REGION 1..11: note = short peptide
EIANQKGVSCR

SEQ ID NO: 5844 - protein, 10 aa, synthetic construct
  REGION 1..10: note = short peptide
EIFPGNGHCY

SEQ ID NO: 5845 - protein, 9 aa, synthetic construct
  REGION 1..9: note = short peptide
HPHCTVAAL

SEQ ID NO: 5846 - protein, 12 aa, synthetic construct
  REGION 1..12: note = short peptide
HPGGRGNAGGLH

SEQ ID NO: 5847 - protein, 9 aa, synthetic construct
  REGION 1..9: note = short peptide
EHCSSIVMI

SEQ ID NO: 5848 - protein, 9 aa, synthetic construct
  REGION 1..9: note = short peptide
TRDCHPRQV

SEQ ID NO: 5849 - protein, 12 aa, synthetic construct
  REGION 1..12: note = short peptide
EHCNFNDVTTRL

SEQ ID NO: 5850 - protein, 9 aa, synthetic construct
  REGION 1..9: note = short peptide
VPDECPRTV

SEQ ID NO: 5851 - protein, 10 aa, synthetic construct
  REGION 1..10: note = short peptide
HTSEKPFACK

SEQ ID NO: 5852 - protein, 11 aa, synthetic construct
  REGION 1..11: note = short peptide
APRCPENAFFL

SEQ ID NO: 5853 - protein, 10 aa, synthetic construct
  REGION 1..10: note = short peptide
HTKDQPLKCK

SEQ ID NO: 5854 - protein, 11 aa, synthetic construct
  REGION 1..11: note = short peptide
HTANLCVLLYR

SEQ ID NO: 5855 - protein, 9 aa, synthetic construct
  REGION 1..9: note = short peptide
HSPCANTSL

SEQ ID NO: 5856 - protein, 9 aa, synthetic construct
  REGION 1..9: note = short peptide
YLNCIVEKV

SEQ ID NO: 5857 - protein, 10 aa, synthetic construct
  REGION 1..10: note = short peptide
VPASVNCLRL

SEQ ID NO: 5858 - protein, 10 aa, synthetic construct
  REGION 1..10: note = short peptide
APRKLKVCHF

SEQ ID NO: 5859 - protein, 9 aa, synthetic construct
  REGION 1..9: note = short peptide
HSKFHLCSV

SEQ ID NO: 5860 - protein, 9 aa, synthetic construct
  REGION 1..9: note = short peptide
TQSCSSNAL

SEQ ID NO: 5861 - protein, 8 aa, synthetic construct
  REGION 1..8: note = short peptide
VNVKGLFV

SEQ ID NO: 5862 - protein, 9 aa, synthetic construct
  REGION 1..9: note = short peptide
VNTGIGMTK

SEQ ID NO: 5863 - protein, 10 aa, synthetic construct
  REGION 1..10: note = short peptide
HRCQKAMTAK

SEQ ID NO: 5864 - protein, 9 aa, synthetic construct
  REGION 1..9: note = short peptide
HPAPRGCAA

SEQ ID NO: 5865 - protein, 9 aa, synthetic construct
  REGION 1..9: note = short peptide
EITYPFACR

SEQ ID NO: 5866 - protein, 9 aa, synthetic construct
  REGION 1..9: note = short peptide
HESILHKCI

SEQ ID NO: 5867 - protein, 9 aa, synthetic construct
  REGION 1..9: note = short peptide
TTVPLVCNK

SEQ ID NO: 5868 - protein, 8 aa, synthetic construct
  REGION 1..8: note = short peptide
HHAKIVCL

SEQ ID NO: 5869 - protein, 9 aa, synthetic construct
  REGION 1..9: note = short peptide
HGQTGVESV

SEQ ID NO: 5870 - protein, 9 aa, synthetic construct
  REGION 1..9: note = short peptide
AVAPPGCSH

SEQ ID NO: 5871 - protein, 9 aa, synthetic construct
  REGION 1..9: note = short peptide
HEVFLCRVA

SEQ ID NO: 5872 - protein, 9 aa, synthetic construct
  REGION 1..9: note = short peptide
HETNGVAKS

SEQ ID NO: 5873 - protein, 9 aa, synthetic construct
  REGION 1..9: note = short peptide
HESVCKYYL

SEQ ID NO: 5874 - protein, 9 aa, synthetic construct
  REGION 1..9: note = short peptide
YGKSRCKQV

SEQ ID NO: 5875 - protein, 9 aa, synthetic construct
  REGION 1..9: note = short peptide
HELPFYGCA

SEQ ID NO: 5876 - protein, 9 aa, synthetic construct
  REGION 1..9: note = short peptide
HEKVQENCI

SEQ ID NO: 5877 - protein, 9 aa, synthetic construct
  REGION 1..9: note = short peptide
HEICSKIMA

SEQ ID NO: 5878 - protein, 9 aa, synthetic construct
  REGION 1..9: note = short peptide
HDPNTRHCL

SEQ ID NO: 5879 - protein, 8 aa, synthetic construct
  REGION 1..8: note = short peptide
HDETCQVI

SEQ ID NO: 5880 - protein, 9 aa, synthetic construct
  REGION 1..9: note = short peptide
HHFDQCLMI

SEQ ID NO: 5881 - protein, 8 aa, synthetic construct
  REGION 1..8: note = short peptide
TSCLKETL

SEQ ID NO: 5882 - protein, 8 aa, synthetic construct
  REGION 1..8: note = short peptide
EIYDCKVE

SEQ ID NO: 5883 - protein, 10 aa, synthetic construct
  REGION 1..10: note = short peptide
HMQNSEIIRK

SEQ ID NO: 5884 - protein, 12 aa, synthetic construct
  REGION 1..12: note = short peptide
EKPVQVPCGHVF

SEQ ID NO: 5885 - protein, 9 aa, synthetic construct
  REGION 1..9: note = short peptide
ELCDIILRV

SEQ ID NO: 5886 - protein, 9 aa, synthetic construct
  REGION 1..9: note = short peptide
HLSCVKILL

SEQ ID NO: 5887 - protein, 9 aa, synthetic construct
  REGION 1..9: note = short peptide
ELICHIGSL

SEQ ID NO: 5888 - protein, 8 aa, synthetic construct
  REGION 1..8: note = short peptide
TTDCLQIL

SEQ ID NO: 5889 - protein, 9 aa, synthetic construct
  REGION 1..9: note = short peptide
HLAAFINKF

SEQ ID NO: 5890 - protein, 8 aa, synthetic construct
  REGION 1..8: note = short peptide
HITCKPEY

SEQ ID NO: 5891 - protein, 10 aa, synthetic construct
  REGION 1..10: note = short peptide
YLICDHMRAV

SEQ ID NO: 5892 - protein, 8 aa, synthetic construct
  REGION 1..8: note = short peptide
HHNCSESL

SEQ ID NO: 5893 - protein, 9 aa, synthetic construct
  REGION 1..9: note = short peptide
AQCGQTFAK

SEQ ID NO: 5894 - protein, 9 aa, synthetic construct
  REGION 1..9: note = short peptide
HVICLAEEF

SEQ ID NO: 5895 - protein, 10 aa, synthetic construct
  REGION 1..10: note = short peptide
HVLDVAGNRL

SEQ ID NO: 5896 - protein, 11 aa, synthetic construct
  REGION 1..11: note = short peptide
AVIDCAGILKL

SEQ ID NO: 5897 - protein, 15 aa, synthetic construct
  REGION 1..15: note = short peptide
VPRIDCVSKNEDIPN

SEQ ID NO: 5898 - protein, 9 aa, synthetic construct
  REGION 1..9: note = short peptide
DVGQIFSCR

SEQ ID NO: 5899 - protein, 10 aa, synthetic construct
  REGION 1..10: note = short peptide
TMYPGSCVKK

SEQ ID NO: 5900 - protein, 11 aa, synthetic construct
  REGION 1..11: note = short peptide
VPRDCLGEVTF

SEQ ID NO: 5901 - protein, 10 aa, synthetic construct
  REGION 1..10: note = short peptide
TNIAIFCETR

SEQ ID NO: 5902 - protein, 9 aa, synthetic construct
  REGION 1..9: note = short peptide
DVIDCFSML

SEQ ID NO: 5903 - protein, 9 aa, synthetic construct
  REGION 1..9: note = short peptide
TNLRLIESL

SEQ ID NO: 5904 - protein, 9 aa, synthetic construct
  REGION 1..9: note = short peptide
DVQKKNCSL

SEQ ID NO: 5905 - protein, 8 aa, synthetic construct
  REGION 1..8: note = short peptide
VPPVLVPN

SEQ ID NO: 5906 - protein, 10 aa, synthetic construct
  REGION 1..10: note = short peptide
TPCPGPFLRY

SEQ ID NO: 5907 - protein, 9 aa, synthetic construct
  REGION 1..9: note = short peptide
DVVCRMLGF

SEQ ID NO: 5908 - protein, 8 aa, synthetic construct
  REGION 1..8: note = short peptide
TPCYKQTL

SEQ ID NO: 5909 - protein, 9 aa, synthetic construct
  REGION 1..9: note = short peptide
IRAAGIKCL

SEQ ID NO: 5910 - protein, 8 aa, synthetic construct
  REGION 1..8: note = short peptide
IRHPGHCL

SEQ ID NO: 5911 - protein, 11 aa, synthetic construct
  REGION 1..11: note = short peptide
TLVNTGIGMTK

SEQ ID NO: 5912 - protein, 11 aa, synthetic construct
  REGION 1..11: note = short peptide
APCSVAPGKSL

SEQ ID NO: 5913 - protein, 9 aa, synthetic construct
  REGION 1..9: note = short peptide
DTGLCRVLY

SEQ ID NO: 5914 - protein, 10 aa, synthetic construct
  REGION 1..10: note = short peptide
YEVCKEGDVL

SEQ ID NO: 5915 - protein, 9 aa, synthetic construct
  REGION 1..9: note = short peptide
IVGKVGCGK

SEQ ID NO: 5916 - protein, 10 aa, synthetic construct
  REGION 1..10: note = short peptide
DTNCPTGLQR

SEQ ID NO: 5917 - protein, 11 aa, synthetic construct
  REGION 1..11: note = short peptide
IVDNMPVTWCY

SEQ ID NO: 5918 - protein, 13 aa, synthetic construct
  REGION 1..13: note = short peptide
AVLGAVVTAMMCR

SEQ ID NO: 5919 - protein, 9 aa, synthetic construct
  REGION 1..9: note = short peptide
ITDRCLPSY

SEQ ID NO: 5920 - protein, 10 aa, synthetic construct
  REGION 1..10: note = short peptide
ITAPVVCTRK

SEQ ID NO: 5921 - protein, 9 aa, synthetic construct
  REGION 1..9: note = short peptide
VPSLRVICF

SEQ ID NO: 5922 - protein, 9 aa, synthetic construct
  REGION 1..9: note = short peptide
AVLDFCYHL

SEQ ID NO: 5923 - protein, 11 aa, synthetic construct
  REGION 1..11: note = short peptide
ISNAQLFAASR

SEQ ID NO: 5924 - protein, 9 aa, synthetic construct
  REGION 1..9: note = short peptide
APDCRFLTI

SEQ ID NO: 5925 - protein, 9 aa, synthetic construct
  REGION 1..9: note = short peptide
AVIEQGDCK

SEQ ID NO: 5926 - protein, 8 aa, synthetic construct
  REGION 1..8: note = short peptide
DYLDQPCY

SEQ ID NO: 5927 - protein, 9 aa, synthetic construct
  REGION 1..9: note = short peptide
IHCNMTLLF

SEQ ID NO: 5928 - protein, 9 aa, synthetic construct
  REGION 1..9: note = short peptide
TPRSEPHCL

SEQ ID NO: 5929 - protein, 8 aa, synthetic construct
  REGION 1..8: note = short peptide
IFPHLCSL

SEQ ID NO: 5930 - protein, 11 aa, synthetic construct
  REGION 1..11: note = short peptide
IEEGCIHIISL

SEQ ID NO: 5931 - protein, 9 aa, synthetic construct
  REGION 1..9: note = short peptide
TQCEKSNQI

SEQ ID NO: 5932 - protein, 8 aa, synthetic construct
  REGION 1..8: note = short peptide
IDANDGAR

SEQ ID NO: 5933 - protein, 9 aa, synthetic construct
  REGION 1..9: note = short peptide
VPFSLCQSV

SEQ ID NO: 5934 - protein, 9 aa, synthetic construct
  REGION 1..9: note = short peptide
IHNRCKDTL

SEQ ID NO: 5935 - protein, 9 aa, synthetic construct
  REGION 1..9: note = short peptide
EDAGILCQR

SEQ ID NO: 5936 - protein, 9 aa, synthetic construct
  REGION 1..9: note = short peptide
ILYCIPLRY

SEQ ID NO: 5937 - protein, 10 aa, synthetic construct
  REGION 1..10: note = short peptide
EAARICANKY

SEQ ID NO: 5938 - protein, 11 aa, synthetic construct
  REGION 1..11: note = short peptide
ILQNCHDDAAK

SEQ ID NO: 5939 - protein, 10 aa, synthetic construct
  REGION 1..10: note = short peptide
EAHIPGSPFK

SEQ ID NO: 5940 - protein, 11 aa, synthetic construct
  REGION 1..11: note = short peptide
ILQGPCEQISK

SEQ ID NO: 5941 - protein, 9 aa, synthetic construct
  REGION 1..9: note = short peptide
TPLLCLVSY

SEQ ID NO: 5942 - protein, 9 aa, synthetic construct
  REGION 1..9: note = short peptide
ILCEFINKL

SEQ ID NO: 5943 - protein, 9 aa, synthetic construct
  REGION 1..9: note = short peptide
EAVKLCDSY

SEQ ID NO: 5944 - protein, 10 aa, synthetic construct
  REGION 1..10: note = short peptide
ECISSGIILK

SEQ ID NO: 5945 - protein, 9 aa, synthetic construct
  REGION 1..9: note = short peptide
IIMCEPIQH

SEQ ID NO: 5946 - protein, 9 aa, synthetic construct
  REGION 1..9: note = short peptide
IIKQGCLLK

SEQ ID NO: 5947 - protein, 9 aa, synthetic construct
  REGION 1..9: note = short peptide
IHQVGVYCL

SEQ ID NO: 5948 - protein, 8 aa, synthetic construct
  REGION 1..8: note = short peptide
HDCFPVLF

SEQ ID NO: 5949 - protein, 9 aa, synthetic construct
  REGION 1..9: note = short peptide
HCSQVDSVR

SEQ ID NO: 5950 - protein, 9 aa, synthetic construct
  REGION 1..9: note = short peptide
FECIGNVKV

SEQ ID NO: 5951 - protein, 14 aa, synthetic construct
  REGION 1..14: note = short peptide
GELNGNAGEREISL

SEQ ID NO: 5952 - protein, 9 aa, synthetic construct
  REGION 1..9: note = short peptide
FEFLNICQV

SEQ ID NO: 5953 - protein, 9 aa, synthetic construct
  REGION 1..9: note = short peptide
GELLIKPCA

SEQ ID NO: 5954 - protein, 9 aa, synthetic construct
  REGION 1..9: note = short peptide
FEKEQSICA

SEQ ID NO: 5955 - protein, 10 aa, synthetic construct
  REGION 1..10: note = short peptide
VEIDSGKCVL

SEQ ID NO: 5956 - protein, 12 aa, synthetic construct
  REGION 1..12: note = short peptide
GEIKALAGCDFL

SEQ ID NO: 5957 - protein, 9 aa, synthetic construct
  REGION 1..9: note = short peptide
GEIFSLCLP

SEQ ID NO: 5958 - protein, 9 aa, synthetic construct
  REGION 1..9: note = short peptide
GHFCGVAEM

SEQ ID NO: 5959 - protein, 10 aa, synthetic construct
  REGION 1..10: note = short peptide
GEIEHHCSGL

SEQ ID NO: 5960 - protein, 9 aa, synthetic construct
  REGION 1..9: note = short peptide
GEHSIYCTV

SEQ ID NO: 5961 - protein, 11 aa, synthetic construct
  REGION 1..11: note = short peptide
VISNARENIQR

SEQ ID NO: 5962 - protein, 10 aa, synthetic construct
  REGION 1..10: note = short peptide
GEGCVGKTSL

SEQ ID NO: 5963 - protein, 9 aa, synthetic construct
  REGION 1..9: note = short peptide
VENQSANCL

SEQ ID NO: 5964 - protein, 11 aa, synthetic construct
  REGION 1..11: note = short peptide
GEEEGCASIRL

SEQ ID NO: 5965 - protein, 9 aa, synthetic construct
  REGION 1..9: note = short peptide
GECGKAFTL

SEQ ID NO: 5966 - protein, 9 aa, synthetic construct
  REGION 1..9: note = short peptide
EVVDVQLCY

SEQ ID NO: 5967 - protein, 12 aa, synthetic construct
  REGION 1..12: note = short peptide
VLCPVIGKLLHK

SEQ ID NO: 5968 - protein, 9 aa, synthetic construct
  REGION 1..9: note = short peptide
GEYCPEVKL

SEQ ID NO: 5969 - protein, 9 aa, synthetic construct
  REGION 1..9: note = short peptide
VDLPHCHLI

SEQ ID NO: 5970 - protein, 9 aa, synthetic construct
  REGION 1..9: note = short peptide
GEVVDCVIM

SEQ ID NO: 5971 - protein, 10 aa, synthetic construct
  REGION 1..10: note = short peptide
GEVVDCTLKL

SEQ ID NO: 5972 - protein, 9 aa, synthetic construct
  REGION 1..9: note = short peptide
VDLPHCHLI

SEQ ID NO: 5973 - protein, 11 aa, synthetic construct
  REGION 1..11: note = short peptide
GEVNEILFCQL

SEQ ID NO: 5974 - protein, 11 aa, synthetic construct
  REGION 1..11: note = short peptide
GETETRLECLL

SEQ ID NO: 5975 - protein, 9 aa, synthetic construct
  REGION 1..9: note = short peptide
GESLPCVKL

SEQ ID NO: 5976 - protein, 10 aa, synthetic construct
  REGION 1..10: note = short peptide
GESDGFLRCL

SEQ ID NO: 5977 - protein, 11 aa, synthetic construct
  REGION 1..11: note = short peptide
GENVFGVCHIF

SEQ ID NO: 5978 - protein, 9 aa, synthetic construct
  REGION 1..9: note = short peptide
ATELPCHHY

SEQ ID NO: 5979 - protein, 9 aa, synthetic construct
  REGION 1..9: note = short peptide
FTKCKNFAL

SEQ ID NO: 5980 - protein, 9 aa, synthetic construct
  REGION 1..9: note = short peptide
VHSQCVTGL

SEQ ID NO: 5981 - protein, 9 aa, synthetic construct
  REGION 1..9: note = short peptide
FMSSCNYQY

SEQ ID NO: 5982 - protein, 9 aa, synthetic construct
  REGION 1..9: note = short peptide
VHAACLVYI

SEQ ID NO: 5983 - protein, 9 aa, synthetic construct
  REGION 1..9: note = short peptide
FRNGLKLML

SEQ ID NO: 5984 - protein, 9 aa, synthetic construct
  REGION 1..9: note = short peptide
VHEKNGKKI

SEQ ID NO: 5985 - protein, 11 aa, synthetic construct
  REGION 1..11: note = short peptide
FQVCADKVLGI

SEQ ID NO: 5986 - protein, 9 aa, synthetic construct
  REGION 1..9: note = short peptide
VHFCGLLTL

SEQ ID NO: 5987 - protein, 11 aa, synthetic construct
  REGION 1..11: note = short peptide
VHNITVCEQKI

SEQ ID NO: 5988 - protein, 12 aa, synthetic construct
  REGION 1..12: note = short peptide
FPVQPCSAVHLL

SEQ ID NO: 5989 - protein, 10 aa, synthetic construct
  REGION 1..10: note = short peptide
FPSCQPPLSL

SEQ ID NO: 5990 - protein, 8 aa, synthetic construct
  REGION 1..8: note = short peptide
ASVIRGQV

SEQ ID NO: 5991 - protein, 12 aa, synthetic construct
  REGION 1..12: note = short peptide
GCVVANRFHQLL

SEQ ID NO: 5992 - protein, 9 aa, synthetic construct
  REGION 1..9: note = short peptide
VINGHTLCL

SEQ ID NO: 5993 - protein, 10 aa, synthetic construct
  REGION 1..10: note = short peptide
GCNAGVSPSF

SEQ ID NO: 5994 - protein, 10 aa, synthetic construct
  REGION 1..10: note = short peptide
GCAADQAKQL

SEQ ID NO: 5995 - protein, 10 aa, synthetic construct
  REGION 1..10: note = short peptide
GAVVTAMMCR

SEQ ID NO: 5996 - protein, 9 aa, synthetic construct
  REGION 1..9: note = short peptide
VFICTSPLL

SEQ ID NO: 5997 - protein, 10 aa, synthetic construct
  REGION 1..10: note = short peptide
ATCPPSKSSK

SEQ ID NO: 5998 - protein, 9 aa, synthetic construct
  REGION 1..9: note = short peptide
FYSEICNML

SEQ ID NO: 5999 - protein, 9 aa, synthetic construct
  REGION 1..9: note = short peptide
FYSEICNML

SEQ ID NO: 6000 - protein, 9 aa, synthetic construct
  REGION 1..9: note = short peptide
VFPTICFGF

SEQ ID NO: 6001 - protein, 9 aa, synthetic construct
  REGION 1..9: note = short peptide
FVNFTDICK

SEQ ID NO: 6002 - protein, 9 aa, synthetic construct
  REGION 1..9: note = short peptide
FLVCLNHAL

SEQ ID NO: 6003 - protein, 9 aa, synthetic construct
  REGION 1..9: note = short peptide
ATCELPLQK

SEQ ID NO: 6004 - protein, 9 aa, synthetic construct
  REGION 1..9: note = short peptide
VAIFKTPCF

SEQ ID NO: 6005 - protein, 11 aa, synthetic construct
  REGION 1..11: note = short peptide
EPIEILPNVCY

SEQ ID NO: 6006 - protein, 9 aa, synthetic construct
  REGION 1..9: note = short peptide
ESTCIHSTW

SEQ ID NO: 6007 - protein, 9 aa, synthetic construct
  REGION 1..9: note = short peptide
ARASGVCAR

SEQ ID NO: 6008 - protein, 10 aa, synthetic construct
  REGION 1..10: note = short peptide
ESTSATCQVR

SEQ ID NO: 6009 - protein, 11 aa, synthetic construct
  REGION 1..11: note = short peptide
GVCSSKVYVGK

SEQ ID NO: 6010 - protein, 12 aa, synthetic construct
  REGION 1..12: note = short peptide
ETADILCPKAKR

SEQ ID NO: 6011 - protein, 9 aa, synthetic construct
  REGION 1..9: note = short peptide
VLSCVIERV

SEQ ID NO: 6012 - protein, 12 aa, synthetic construct
  REGION 1..12: note = short peptide
GTQTYICNVNHK

SEQ ID NO: 6013 - protein, 11 aa, synthetic construct
  REGION 1..11: note = short peptide
VLQECKTVALK

SEQ ID NO: 6014 - protein, 11 aa, synthetic construct
  REGION 1..11: note = short peptide
GTCHNLPGLFR

SEQ ID NO: 6015 - protein, 10 aa, synthetic construct
  REGION 1..10: note = short peptide
ARKLPCGHLF

SEQ ID NO: 6016 - protein, 10 aa, synthetic construct
  REGION 1..10: note = short peptide
GTCEDASLCK

SEQ ID NO: 6017 - protein, 13 aa, synthetic construct
  REGION 1..13: note = short peptide
ARLHPRAVNCRKK

SEQ ID NO: 6018 - protein, 10 aa, synthetic construct
  REGION 1..10: note = short peptide
ETVLTCATGR

SEQ ID NO: 6019 - protein, 9 aa, synthetic construct
  REGION 1..9: note = short peptide
GSCENTYSK

SEQ ID NO: 6020 - protein, 9 aa, synthetic construct
  REGION 1..9: note = short peptide
GRVCQGIGM

SEQ ID NO: 6021 - protein, 9 aa, synthetic construct
  REGION 1..9: note = short peptide
HASQFSTCL

SEQ ID NO: 6022 - protein, 9 aa, synthetic construct
  REGION 1..9: note = short peptide
HANGTDVCL

SEQ ID NO: 6023 - protein, 8 aa, synthetic construct
  REGION 1..8: note = short peptide
HAFHFHCI

SEQ ID NO: 6024 - protein, 8 aa, synthetic construct
  REGION 1..8: note = short peptide
ERSLPLCL

SEQ ID NO: 6025 - protein, 8 aa, synthetic construct
  REGION 1..8: note = short peptide
ESENVVCH

SEQ ID NO: 6026 - protein, 9 aa, synthetic construct
  REGION 1..9: note = short peptide
GVSTCHFAW

SEQ ID NO: 6027 - protein, 9 aa, synthetic construct
  REGION 1..9: note = short peptide
GVSGVCVCK

SEQ ID NO: 6028 - protein, 10 aa, synthetic construct
  REGION 1..10: note = short peptide
GVSCPVGIKK

SEQ ID NO: 6029 - protein, 10 aa, synthetic construct
  REGION 1..10: note = short peptide
AQVCAIIERV

SEQ ID NO: 6030 - protein, 9 aa, synthetic construct
  REGION 1..9: note = short peptide
GRLYHRHCF

SEQ ID NO: 6031 - protein, 13 aa, synthetic construct
  REGION 1..13: note = short peptide
EVIPITNSELRQK

SEQ ID NO: 6032 - protein, 10 aa, synthetic construct
  REGION 1..10: note = short peptide
TYVKGLCFLF

SEQ ID NO: 6033 - protein, 9 aa, synthetic construct
  REGION 1..9: note = short peptide
VAACPRQEL

SEQ ID NO: 6034 - protein, 11 aa, synthetic construct
  REGION 1..11: note = short peptide
VLFDHVGCLKK

SEQ ID NO: 6035 - protein, 12 aa, synthetic construct
  REGION 1..12: note = short peptide
GLIDGRLTICTI

SEQ ID NO: 6036 - protein, 11 aa, synthetic construct
  REGION 1..11: note = short peptide
GLFECDKLTYL

SEQ ID NO: 6037 - protein, 10 aa, synthetic construct
  REGION 1..10: note = short peptide
GLCKFGFYEV

SEQ ID NO: 6038 - protein, 9 aa, synthetic construct
  REGION 1..9: note = short peptide
EVKRYQCTF

SEQ ID NO: 6039 - protein, 11 aa, synthetic construct
  REGION 1..11: note = short peptide
EVLSECRLLAY

SEQ ID NO: 6040 - protein, 10 aa, synthetic construct
  REGION 1..10: note = short peptide
GMACGGVVGV

SEQ ID NO: 6041 - protein, 13 aa, synthetic construct
  REGION 1..13: note = short peptide
EVIGAGEFGEVCR

SEQ ID NO: 6042 - protein, 10 aa, synthetic construct
  REGION 1..10: note = short peptide
GRLDGALCSY

SEQ ID NO: 6043 - protein, 9 aa, synthetic construct
  REGION 1..9: note = short peptide
GRLARCIVR

SEQ ID NO: 6044 - protein, 9 aa, synthetic construct
  REGION 1..9: note = short peptide
ARSLVCLGV

SEQ ID NO: 6045 - protein, 9 aa, synthetic construct
  REGION 1..9: note = short peptide
GRHCVVKSR

SEQ ID NO: 6046 - protein, 8 aa, synthetic construct
  REGION 1..8: note = short peptide
GRDLSYCL

SEQ ID NO: 6047 - protein, 9 aa, synthetic construct
  REGION 1..9: note = short peptide
EVALRVPCL

SEQ ID NO: 6048 - protein, 9 aa, synthetic construct
  REGION 1..9: note = short peptide
GQPNILICL

SEQ ID NO: 6049 - protein, 9 aa, synthetic construct
  REGION 1..9: note = short peptide
ASAIGCHVV

SEQ ID NO: 6050 - protein, 10 aa, synthetic construct
  REGION 1..10: note = short peptide
YLCPAIINQI

SEQ ID NO: 6051 - protein, 11 aa, synthetic construct
  REGION 1..11: note = short peptide
TVYGGYLCSVR

SEQ ID NO: 6052 - protein, 11 aa, synthetic construct
  REGION 1..11: note = short peptide
GQCGNQIGAKF

SEQ ID NO: 6053 - protein, 9 aa, synthetic construct
  REGION 1..9: note = short peptide
TYIQCIAAI

SEQ ID NO: 6054 - protein, 10 aa, synthetic construct
  REGION 1..10: note = short peptide
EVFRFASACM

SEQ ID NO: 6055 - protein, 9 aa, synthetic construct
  REGION 1..9: note = short peptide
TYTCQVTHI

SEQ ID NO: 6056 - protein, 9 aa, synthetic construct
  REGION 1..9: note = short peptide
GNKGCNGGF

SEQ ID NO: 6057 - protein, 10 aa, synthetic construct
  REGION 1..10: note = short peptide
IVYCQDQVYR

SEQ ID NO: 6058 - protein, 8 aa, synthetic construct
  REGION 1..8: note = short peptide
WFYYQYLL

SEQ ID NO: 6059 - protein, 10 aa, synthetic construct
  REGION 1..10: note = short peptide
TEAEFACHSY

SEQ ID NO: 6060 - protein, 9 aa, synthetic construct
  REGION 1..9: note = short peptide
CYVTIFQNI

SEQ ID NO: 6061 - protein, 9 aa, synthetic construct
  REGION 1..9: note = short peptide
DACMNVGKV

SEQ ID NO: 6062 - protein, 9 aa, synthetic construct
  REGION 1..9: note = short peptide
KMLDCSPIL

SEQ ID NO: 6063 - protein, 11 aa, synthetic construct
  REGION 1..11: note = short peptide
DAFCNSDIVIR

SEQ ID NO: 6064 - protein, 9 aa, synthetic construct
  REGION 1..9: note = short peptide
CAIDQDPYF

SEQ ID NO: 6065 - protein, 9 aa, synthetic construct
  REGION 1..9: note = short peptide
KMKLKQQRV

SEQ ID NO: 6066 - protein, 10 aa, synthetic construct
  REGION 1..10: note = short peptide
KMKEHKAICK

SEQ ID NO: 6067 - protein, 9 aa, synthetic construct
  REGION 1..9: note = short peptide
DAIPKTCKR

SEQ ID NO: 6068 - protein, 10 aa, synthetic construct
  REGION 1..10: note = short peptide
TEEAALNKCY

SEQ ID NO: 6069 - protein, 9 aa, synthetic construct
  REGION 1..9: note = short peptide
VVASLPLCH

SEQ ID NO: 6070 - protein, 10 aa, synthetic construct
  REGION 1..10: note = short peptide
CYLDSPLVRF

SEQ ID NO: 6071 - protein, 9 aa, synthetic construct
  REGION 1..9: note = short peptide
CVDAGVWYY

SEQ ID NO: 6072 - protein, 9 aa, synthetic construct
  REGION 1..9: note = short peptide
CEGLWSHSY

SEQ ID NO: 6073 - protein, 9 aa, synthetic construct
  REGION 1..9: note = short peptide
CVEPNCRSK

SEQ ID NO: 6074 - protein, 9 aa, synthetic construct
  REGION 1..9: note = short peptide
CVIDAQWLY

SEQ ID NO: 6075 - protein, 9 aa, synthetic construct
  REGION 1..9: note = short peptide
CVIDEIGKM

SEQ ID NO: 6076 - protein, 9 aa, synthetic construct
  REGION 1..9: note = short peptide
TAVCILEGF

SEQ ID NO: 6077 - protein, 9 aa, synthetic construct
  REGION 1..9: note = short peptide
CYINDLTVI

SEQ ID NO: 6078 - protein, 10 aa, synthetic construct
  REGION 1..10: note = short peptide
KMVDQLFCKK

SEQ ID NO: 6079 - protein, 9 aa, synthetic construct
  REGION 1..9: note = short peptide
KMVDQLFCK

SEQ ID NO: 6080 - protein, 10 aa, synthetic construct
  REGION 1..10: note = short peptide
CVPERSLASY

SEQ ID NO: 6081 - protein, 11 aa, synthetic construct
  REGION 1..11: note = short peptide
CVPGESVRIQR

SEQ ID NO: 6082 - protein, 9 aa, synthetic construct
  REGION 1..9: note = short peptide
CVTGPQATR

SEQ ID NO: 6083 - protein, 10 aa, synthetic construct
  REGION 1..10: note = short peptide
CVVDAGKVTL

SEQ ID NO: 6084 - protein, 9 aa, synthetic construct
  REGION 1..9: note = short peptide
CDNVKWLSF

SEQ ID NO: 6085 - protein, 11 aa, synthetic construct
  REGION 1..11: note = short peptide
KMFCKKSGQSY

SEQ ID NO: 6086 - protein, 9 aa, synthetic construct
  REGION 1..9: note = short peptide
APAERVCAA

SEQ ID NO: 6087 - protein, 9 aa, synthetic construct
  REGION 1..9: note = short peptide
YPFPKDCSQ

SEQ ID NO: 6088 - protein, 8 aa, synthetic construct
  REGION 1..8: note = short peptide
DAVCTRSV

SEQ ID NO: 6089 - protein, 10 aa, synthetic construct
  REGION 1..10: note = short peptide
KLCVFKKIER

SEQ ID NO: 6090 - protein, 9 aa, synthetic construct
  REGION 1..9: note = short peptide
KLCPDILLK

SEQ ID NO: 6091 - protein, 9 aa, synthetic construct
  REGION 1..9: note = short peptide
AYMCPFMQF

SEQ ID NO: 6092 - protein, 10 aa, synthetic construct
  REGION 1..10: note = short peptide
KLCNFAFKTK

SEQ ID NO: 6093 - protein, 10 aa, synthetic construct
  REGION 1..10: note = short peptide
KLCDVTTGLK

SEQ ID NO: 6094 - protein, 9 aa, synthetic construct
  REGION 1..9: note = short peptide
KLCDVAQQR

SEQ ID NO: 6095 - protein, 10 aa, synthetic construct
  REGION 1..10: note = short peptide
TGDPGGQLVL

SEQ ID NO: 6096 - protein, 9 aa, synthetic construct
  REGION 1..9: note = short peptide
TGHCLPVTL

SEQ ID NO: 6097 - protein, 11 aa, synthetic construct
  REGION 1..11: note = short peptide
DAYMGCDQEYK

SEQ ID NO: 6098 - protein, 8 aa, synthetic construct
  REGION 1..8: note = short peptide
TGNKVISF

SEQ ID NO: 6099 - protein, 9 aa, synthetic construct
  REGION 1..9: note = short peptide
KLKEYVDCL

SEQ ID NO: 6100 - protein, 9 aa, synthetic construct
  REGION 1..9: note = short peptide
CAHHLIRLL

SEQ ID NO: 6101 - protein, 9 aa, synthetic construct
  REGION 1..9: note = short peptide
TEKKELCEL

SEQ ID NO: 6102 - protein, 9 aa, synthetic construct
  REGION 1..9: note = short peptide
KLYGPLCGY

SEQ ID NO: 6103 - protein, 11 aa, synthetic construct
  REGION 1..11: note = short peptide
TELKTECAVVL

SEQ ID NO: 6104 - protein, 11 aa, synthetic construct
  REGION 1..11: note = short peptide
KLWDTETGQCI

SEQ ID NO: 6105 - protein, 10 aa, synthetic construct
  REGION 1..10: note = short peptide
DALRFGLCAY

SEQ ID NO: 6106 - protein, 9 aa, synthetic construct
  REGION 1..9: note = short peptide
KLTQFFICV

SEQ ID NO: 6107 - protein, 11 aa, synthetic construct
  REGION 1..11: note = short peptide
KLQECKQTLLK

SEQ ID NO: 6108 - protein, 11 aa, synthetic construct
  REGION 1..11: note = short peptide
KLQANGPVAKK

SEQ ID NO: 6109 - protein, 9 aa, synthetic construct
  REGION 1..9: note = short peptide
KLNSLCMAW

SEQ ID NO: 6110 - protein, 13 aa, synthetic construct
  REGION 1..13: note = short peptide
KLNISFPATGCQK

SEQ ID NO: 6111 - protein, 9 aa, synthetic construct
  REGION 1..9: note = short peptide
TERDGWCLP

SEQ ID NO: 6112 - protein, 9 aa, synthetic construct
  REGION 1..9: note = short peptide
VTIDPTCSW

SEQ ID NO: 6113 - protein, 9 aa, synthetic construct
  REGION 1..9: note = short peptide
CAADIQRQR

SEQ ID NO: 6114 - protein, 8 aa, synthetic construct
  REGION 1..8: note = short peptide
DARKVRCI

SEQ ID NO: 6115 - protein, 9 aa, synthetic construct
  REGION 1..9: note = short peptide
KPEIQCVSA

SEQ ID NO: 6116 - protein, 11 aa, synthetic construct
  REGION 1..11: note = short peptide
KTKQGCTVAEK

SEQ ID NO: 6117 - protein, 9 aa, synthetic construct
  REGION 1..9: note = short peptide
CNAGVSPSF

SEQ ID NO: 6118 - protein, 10 aa, synthetic construct
  REGION 1..10: note = short peptide
KTFDSSCHFF

SEQ ID NO: 6119 - protein, 9 aa, synthetic construct
  REGION 1..9: note = short peptide
KTCQEKFKK

SEQ ID NO: 6120 - protein, 11 aa, synthetic construct
  REGION 1..11: note = short peptide
KTCHSFIINEK

SEQ ID NO: 6121 - protein, 9 aa, synthetic construct
  REGION 1..9: note = short peptide
KTCGHISVR

SEQ ID NO: 6122 - protein, 9 aa, synthetic construct
  REGION 1..9: note = short peptide
SVQCMPVAK

SEQ ID NO: 6123 - protein, 8 aa, synthetic construct
  REGION 1..8: note = short peptide
CNSDLVIR

SEQ ID NO: 6124 - protein, 10 aa, synthetic construct
  REGION 1..10: note = short peptide
KTCEESSFCK

SEQ ID NO: 6125 - protein, 9 aa, synthetic construct
  REGION 1..9: note = short peptide
SVKNKAHCL

SEQ ID NO: 6126 - protein, 9 aa, synthetic construct
  REGION 1..9: note = short peptide
VYIIAGACL

SEQ ID NO: 6127 - protein, 9 aa, synthetic construct
  REGION 1..9: note = short peptide
CPFPGGTVL

SEQ ID NO: 6128 - protein, 8 aa, synthetic construct
  REGION 1..8: note = short peptide
CPGMGVAL

SEQ ID NO: 6129 - protein, 9 aa, synthetic construct
  REGION 1..9: note = short peptide
KSSCVKLQV

SEQ ID NO: 6130 - protein, 10 aa, synthetic construct
  REGION 1..10: note = short peptide
KSREDCCTKF

SEQ ID NO: 6131 - protein, 9 aa, synthetic construct
  REGION 1..9: note = short peptide
CEVTEVSKL

SEQ ID NO: 6132 - protein, 9 aa, synthetic construct
  REGION 1..9: note = short peptide
CPIPDAPVV

SEQ ID NO: 6133 - protein, 9 aa, synthetic construct
  REGION 1..9: note = short peptide
CPKLRKLVL

SEQ ID NO: 6134 - protein, 9 aa, synthetic construct
  REGION 1..9: note = short peptide
KSMCAGQRL

SEQ ID NO: 6135 - protein, 9 aa, synthetic construct
  REGION 1..9: note = short peptide
CMKSKFLQV

SEQ ID NO: 6136 - protein, 8 aa, synthetic construct
  REGION 1..8: note = short peptide
CHVEHPSL

SEQ ID NO: 6137 - protein, 9 aa, synthetic construct
  REGION 1..9: note = short peptide
CHDSGATVL

SEQ ID NO: 6138 - protein, 10 aa, synthetic construct
  REGION 1..10: note = short peptide
SVCHVPGLKK

SEQ ID NO: 6139 - protein, 11 aa, synthetic construct
  REGION 1..11: note = short peptide
SVCIVAEIIKK

SEQ ID NO: 6140 - protein, 9 aa, synthetic construct
  REGION 1..9: note = short peptide
CHSDLVTDL

SEQ ID NO: 6141 - protein, 9 aa, synthetic construct
  REGION 1..9: note = short peptide
CHSHFHDTL

SEQ ID NO: 6142 - protein, 9 aa, synthetic construct
  REGION 1..9: note = short peptide
KVHCKFQKK

SEQ ID NO: 6143 - protein, 9 aa, synthetic construct
  REGION 1..9: note = short peptide
CHSSLLDHL

SEQ ID NO: 6144 - protein, 9 aa, synthetic construct
  REGION 1..9: note = short peptide
KVCTNIIEK

SEQ ID NO: 6145 - protein, 10 aa, synthetic construct
  REGION 1..10: note = short peptide
KVCGKSFNRM

SEQ ID NO: 6146 - protein, 9 aa, synthetic construct
  REGION 1..9: note = short peptide
KTSNVCIRF

SEQ ID NO: 6147 - protein, 9 aa, synthetic construct
  REGION 1..9: note = short peptide
KTSCRVGKL

SEQ ID NO: 6148 - protein, 10 aa, synthetic construct
  REGION 1..10: note = short peptide
SVTRPICRGK

SEQ ID NO: 6149 - protein, 9 aa, synthetic construct
  REGION 1..9: note = short peptide
CPLQQSPRA

SEQ ID NO: 6150 - protein, 9 aa, synthetic construct
  REGION 1..9: note = short peptide
KPYEECQTL

SEQ ID NO: 6151 - protein, 8 aa, synthetic construct
  REGION 1..8: note = short peptide
CSKRKEVL

SEQ ID NO: 6152 - protein, 9 aa, synthetic construct
  REGION 1..9: note = short peptide
ALTKFLKCV

SEQ ID NO: 6153 - protein, 8 aa, synthetic construct
  REGION 1..8: note = short peptide
CSSNKPAI

SEQ ID NO: 6154 - protein, 10 aa, synthetic construct
  REGION 1..10: note = short peptide
CTADWLPIGR

SEQ ID NO: 6155 - protein, 9 aa, synthetic construct
  REGION 1..9: note = short peptide
CTDCYSNEY

SEQ ID NO: 6156 - protein, 8 aa, synthetic construct
  REGION 1..8: note = short peptide
CTENMQKF

SEQ ID NO: 6157 - protein, 9 aa, synthetic construct
  REGION 1..9: note = short peptide
ALYCEFINR

SEQ ID NO: 6158 - protein, 8 aa, synthetic construct
  REGION 1..8: note = short peptide
CEIQVQAL

SEQ ID NO: 6159 - protein, 9 aa, synthetic construct
  REGION 1..9: note = short peptide
CTVANPVSR

SEQ ID NO: 6160 - protein, 11 aa, synthetic construct
  REGION 1..11: note = short peptide
CVADARLPKVF

SEQ ID NO: 6161 - protein, 13 aa, synthetic construct
  REGION 1..13: note = short peptide
TAIEAPSSTCVAR

SEQ ID NO: 6162 - protein, 9 aa, synthetic construct
  REGION 1..9: note = short peptide
TALHICALY

SEQ ID NO: 6163 - protein, 9 aa, synthetic construct
  REGION 1..9: note = short peptide
KQALVNCNW

SEQ ID NO: 6164 - protein, 9 aa, synthetic construct
  REGION 1..9: note = short peptide
KQCGKAFSV

SEQ ID NO: 6165 - protein, 9 aa, synthetic construct
  REGION 1..9: note = short peptide
KRLDSSACL

SEQ ID NO: 6166 - protein, 9 aa, synthetic construct
  REGION 1..9: note = short peptide
SYGRWLCNF

SEQ ID NO: 6167 - protein, 9 aa, synthetic construct
  REGION 1..9: note = short peptide
SYHDCVLLF

SEQ ID NO: 6168 - protein, 11 aa, synthetic construct
  REGION 1..11: note = short peptide
KSASVAPFTCK

SEQ ID NO: 6169 - protein, 11 aa, synthetic construct
  REGION 1..11: note = short peptide
CPTVRYHTKVR

SEQ ID NO: 6170 - protein, 11 aa, synthetic construct
  REGION 1..11: note = short peptide
KRWNSCKQNKQ

SEQ ID NO: 6171 - protein, 10 aa, synthetic construct
  REGION 1..10: note = short peptide
KRWNSCKQNK

SEQ ID NO: 6172 - protein, 9 aa, synthetic construct
  REGION 1..9: note = short peptide
CPVGKDWKL

SEQ ID NO: 6173 - protein, 9 aa, synthetic construct
  REGION 1..9: note = short peptide
KRNSYTNCL

SEQ ID NO: 6174 - protein, 8 aa, synthetic construct
  REGION 1..8: note = short peptide
CPWLGIRI

SEQ ID NO: 6175 - protein, 9 aa, synthetic construct
  REGION 1..9: note = short peptide
KQDKPLPAP

SEQ ID NO: 6176 - protein, 9 aa, synthetic construct
  REGION 1..9: note = short peptide
KRFEIACYK

SEQ ID NO: 6177 - protein, 8 aa, synthetic construct
  REGION 1..8: note = short peptide
CEITAHLL

SEQ ID NO: 6178 - protein, 9 aa, synthetic construct
  REGION 1..9: note = short peptide
KQVNVPNNV

SEQ ID NO: 6179 - protein, 9 aa, synthetic construct
  REGION 1..9: note = short peptide
KQSCTVARI

SEQ ID NO: 6180 - protein, 12 aa, synthetic construct
  REGION 1..12: note = short peptide
KQKGYNHGQGSY

SEQ ID NO: 6181 - protein, 9 aa, synthetic construct
  REGION 1..9: note = short peptide
TAADTCIIF

SEQ ID NO: 6182 - protein, 13 aa, synthetic construct
  REGION 1..13: note = short peptide
TGTKDTVCSGVTG

SEQ ID NO: 6183 - protein, 9 aa, synthetic construct
  REGION 1..9: note = short peptide
DHCHFSQVI

SEQ ID NO: 6184 - protein, 9 aa, synthetic construct
  REGION 1..9: note = short peptide
THVCTHVIL

SEQ ID NO: 6185 - protein, 9 aa, synthetic construct
  REGION 1..9: note = short peptide
THVDKACKL

SEQ ID NO: 6186 - protein, 9 aa, synthetic construct
  REGION 1..9: note = short peptide
KENYCLQAA

SEQ ID NO: 6187 - protein, 9 aa, synthetic construct
  REGION 1..9: note = short peptide
TIINICLKY

SEQ ID NO: 6188 - protein, 10 aa, synthetic construct
  REGION 1..10: note = short peptide
DLVQQSCNYK

SEQ ID NO: 6189 - protein, 8 aa, synthetic construct
  REGION 1..8: note = short peptide
DFKIKCVA

SEQ ID NO: 6190 - protein, 9 aa, synthetic construct
  REGION 1..9: note = short peptide
KEVQRCYLL

SEQ ID NO: 6191 - protein, 10 aa, synthetic construct
  REGION 1..10: note = short peptide
KEVDACVTDL

SEQ ID NO: 6192 - protein, 8 aa, synthetic construct
  REGION 1..8: note = short peptide
KAVSLFLC

SEQ ID NO: 6193 - protein, 10 aa, synthetic construct
  REGION 1..10: note = short peptide
KAVSDICKTF

SEQ ID NO: 6194 - protein, 9 aa, synthetic construct
  REGION 1..9: note = short peptide
DPIRALTCF

SEQ ID NO: 6195 - protein, 11 aa, synthetic construct
  REGION 1..11: note = short peptide
VSQHPSRVICK

SEQ ID NO: 6196 - protein, 8 aa, synthetic construct
  REGION 1..8: note = short peptide
DPICSILI

SEQ ID NO: 6197 - protein, 9 aa, synthetic construct
  REGION 1..9: note = short peptide
TLFHFGNCF

SEQ ID NO: 6198 - protein, 8 aa, synthetic construct
  REGION 1..8: note = short peptide
KDIIACGF

SEQ ID NO: 6199 - protein, 10 aa, synthetic construct
  REGION 1..10: note = short peptide
KEFCPNEQNW

SEQ ID NO: 6200 - protein, 9 aa, synthetic construct
  REGION 1..9: note = short peptide
KEICYEVAL

SEQ ID NO: 6201 - protein, 11 aa, synthetic construct
  REGION 1..11: note = short peptide
AVSSDTCRSLK

SEQ ID NO: 6202 - protein, 9 aa, synthetic construct
  REGION 1..9: note = short peptide
KEGCTEVSL

SEQ ID NO: 6203 - protein, 11 aa, synthetic construct
  REGION 1..11: note = short peptide
AVRILACGVAK

SEQ ID NO: 6204 - protein, 9 aa, synthetic construct
  REGION 1..9: note = short peptide
YEFCPFHNV

SEQ ID NO: 6205 - protein, 11 aa, synthetic construct
  REGION 1..11: note = short peptide
VSARTNKARAP

SEQ ID NO: 6206 - protein, 9 aa, synthetic construct
  REGION 1..9: note = short peptide
KECGKAFSL

SEQ ID NO: 6207 - protein, 9 aa, synthetic construct
  REGION 1..9: note = short peptide
KEACRAYGL

SEQ ID NO: 6208 - protein, 9 aa, synthetic construct
  REGION 1..9: note = short peptide
KECGKAFSI

SEQ ID NO: 6209 - protein, 9 aa, synthetic construct
  REGION 1..9: note = short peptide
KDSPVLSCF

SEQ ID NO: 6210 - protein, 10 aa, synthetic construct
  REGION 1..10: note = short peptide
DLVQQSCNYK

SEQ ID NO: 6211 - protein, 9 aa, synthetic construct
  REGION 1..9: note = short peptide
DLVNVPLCV

SEQ ID NO: 6212 - protein, 9 aa, synthetic construct
  REGION 1..9: note = short peptide
KDRIHCVAF

SEQ ID NO: 6213 - protein, 9 aa, synthetic construct
  REGION 1..9: note = short peptide
KELEKVCNP

SEQ ID NO: 6214 - protein, 9 aa, synthetic construct
  REGION 1..9: note = short peptide
TKDALCLVL

SEQ ID NO: 6215 - protein, 8 aa, synthetic construct
  REGION 1..8: note = short peptide
KDSCITVM

SEQ ID NO: 6216 - protein, 9 aa, synthetic construct
  REGION 1..9: note = short peptide
TINYLKQFL

SEQ ID NO: 6217 - protein, 11 aa, synthetic construct
  REGION 1..11: note = short peptide
KEKCEAAKEAL

SEQ ID NO: 6218 - protein, 9 aa, synthetic construct
  REGION 1..9: note = short peptide
DHSCQVIVM

SEQ ID NO: 6219 - protein, 11 aa, synthetic construct
  REGION 1..11: note = short peptide
KEISSVDCIAL

SEQ ID NO: 6220 - protein, 9 aa, synthetic construct
  REGION 1..9: note = short peptide
TKCDAISVL

SEQ ID NO: 6221 - protein, 9 aa, synthetic construct
  REGION 1..9: note = short peptide
KETPCILSV

SEQ ID NO: 6222 - protein, 9 aa, synthetic construct
  REGION 1..9: note = short peptide
THNFLFCEF

SEQ ID NO: 6223 - protein, 8 aa, synthetic construct
  REGION 1..8: note = short peptide
THARPICL

SEQ ID NO: 6224 - protein, 9 aa, synthetic construct
  REGION 1..9: note = short peptide
THDCCYDHL

SEQ ID NO: 6225 - protein, 9 aa, synthetic construct
  REGION 1..9: note = short peptide
KACENQRNL

SEQ ID NO: 6226 - protein, 9 aa, synthetic construct
  REGION 1..9: note = short peptide
THDTRLFCL

SEQ ID NO: 6227 - protein, 9 aa, synthetic construct
  REGION 1..9: note = short peptide
DELHLCYQF

SEQ ID NO: 6228 - protein, 9 aa, synthetic construct
  REGION 1..9: note = short peptide
THAHHLRCL

SEQ ID NO: 6229 - protein, 11 aa, synthetic construct
  REGION 1..11: note = short peptide
TLMGQCQDLRK

SEQ ID NO: 6230 - protein, 14 aa, synthetic construct
  REGION 1..14: note = short peptide
DCVLYRYGSFSVTL

SEQ ID NO: 6231 - protein, 13 aa, synthetic construct
  REGION 1..13: note = short peptide
TGTKNTVCSGVTG

SEQ ID NO: 6232 - protein, 10 aa, synthetic construct
  REGION 1..10: note = short peptide
IYLQLDCARF

SEQ ID NO: 6233 - protein, 10 aa, synthetic construct
  REGION 1..10: note = short peptide
IYLQLDCARF

SEQ ID NO: 6234 - protein, 9 aa, synthetic construct
  REGION 1..9: note = short peptide
VTCGGGVQK

SEQ ID NO: 6235 - protein, 11 aa, synthetic construct
  REGION 1..11: note = short peptide
DSVCYSVAVTR

SEQ ID NO: 6236 - protein, 10 aa, synthetic construct
  REGION 1..10: note = short peptide
DSKQQNGPPR

SEQ ID NO: 6237 - protein, 9 aa, synthetic construct
  REGION 1..9: note = short peptide
VTCAQALQH

SEQ ID NO: 6238 - protein, 11 aa, synthetic construct
  REGION 1..11: note = short peptide
KILCIEKCFTF

SEQ ID NO: 6239 - protein, 10 aa, synthetic construct
  REGION 1..10: note = short peptide
KIISKNCTSY

SEQ ID NO: 6240 - protein, 9 aa, synthetic construct
  REGION 1..9: note = short peptide
DENCFKLMF

SEQ ID NO: 6241 - protein, 9 aa, synthetic construct
  REGION 1..9: note = short peptide
THHYVPCSL

SEQ ID NO: 6242 - protein, 9 aa, synthetic construct
  REGION 1..9: note = short peptide
VQKITLDCI

SEQ ID NO: 6243 - protein, 9 aa, synthetic construct
  REGION 1..9: note = short peptide
THIQQAPAL

SEQ ID NO: 6244 - protein, 8 aa, synthetic construct
  REGION 1..8: note = short peptide
DEVIMCTF

SEQ ID NO: 6245 - protein, 8 aa, synthetic construct
  REGION 1..8: note = short peptide
VQRAANHY

SEQ ID NO: 6246 - protein, 9 aa, synthetic construct
  REGION 1..9: note = short peptide
KFINGAKEI

SEQ ID NO: 6247 - protein, 11 aa, synthetic construct
  REGION 1..11: note = short peptide
TLMGQCQDLRK

SEQ ID NO: 6248 - protein, 11 aa, synthetic construct
  REGION 1..11: note = short peptide
NVIAIVDPLTR

SEQ ID NO: 6249 - protein, 11 aa, synthetic construct
  REGION 1..11: note = short peptide
NVAQLQLVLGR

SEQ ID NO: 6250 - protein, 10 aa, synthetic construct
  REGION 1..10: note = short peptide
NSARIGAVKR

SEQ ID NO: 6251 - protein, 11 aa, synthetic construct
  REGION 1..11: note = short peptide
NFDKYHPGYFG

SEQ ID NO: 6252 - protein, 11 aa, synthetic construct
  REGION 1..11: note = short peptide
YFYSFGGCHRY

SEQ ID NO: 6253 - protein, 9 aa, synthetic construct
  REGION 1..9: note = short peptide
VVFAPVICK

SEQ ID NO: 6254 - protein, 9 aa, synthetic construct
  REGION 1..9: note = short peptide
VTRCGFATR

SEQ ID NO: 6255 - protein, 15 aa, synthetic construct
  REGION 1..15: note = short peptide
NLAKGKEESLDSDLY

SEQ ID NO: 6256 - protein, 9 aa, synthetic construct
  REGION 1..9: note = short peptide
YHGDGMVCL

SEQ ID NO: 6257 - protein, 9 aa, synthetic construct
  REGION 1..9: note = short peptide
RVAGCSVHK

SEQ ID NO: 6258 - protein, 8 aa, synthetic construct
  REGION 1..8: note = short peptide
RQKHKEAL

SEQ ID NO: 6259 - protein, 11 aa, synthetic construct
  REGION 1..11: note = short peptide
THEAVTIKCTF

SEQ ID NO: 6260 - protein, 10 aa, synthetic construct
  REGION 1..10: note = short peptide
SQASDTCHSY

SEQ ID NO: 6261 - protein, 8 aa, synthetic construct
  REGION 1..8: note = short peptide
SNKKRICL

SEQ ID NO: 6262 - protein, 10 aa, synthetic construct
  REGION 1..10: note = short peptide
QVALGNISSK

SEQ ID NO: 6263 - protein, 9 aa, synthetic construct
  REGION 1..9: note = short peptide
RAKECSQAL

SEQ ID NO: 6264 - protein, 10 aa, synthetic construct
  REGION 1..10: note = short peptide
RDLERGCHLL

SEQ ID NO: 6265 - protein, 9 aa, synthetic construct
  REGION 1..9: note = short peptide
VHDCVNITI

SEQ ID NO: 6266 - protein, 11 aa, synthetic construct
  REGION 1..11: note = short peptide
PNGALLMGILG

SEQ ID NO: 6267 - protein, 9 aa, synthetic construct
  REGION 1..9: note = short peptide
QDNCRAANF

SEQ ID NO: 6268 - protein, 15 aa, synthetic construct
  REGION 1..15: note = short peptide
VINQTQKENLRKFYK

SEQ ID NO: 6269 - protein, 9 aa, synthetic construct
  REGION 1..9: note = short peptide
THSSVKLTW

SEQ ID NO: 6270 - protein, 9 aa, synthetic construct
  REGION 1..9: note = short peptide
RPRPPCAKP

SEQ ID NO: 6271 - protein, 9 aa, synthetic construct
  REGION 1..9: note = short peptide
RHDNQCILI

SEQ ID NO: 6272 - protein, 9 aa, synthetic construct
  REGION 1..9: note = short peptide
TQFGSTVNY

SEQ ID NO: 6273 - protein, 9 aa, synthetic construct
  REGION 1..9: note = short peptide
TQCGSLIGK

SEQ ID NO: 6274 - protein, 9 aa, synthetic construct
  REGION 1..9: note = short peptide
RIKKGSHRW

SEQ ID NO: 6275 - protein, 9 aa, synthetic construct
  REGION 1..9: note = short peptide
RLCPHPLLR

SEQ ID NO: 6276 - protein, 13 aa, synthetic construct
  REGION 1..13: note = short peptide
TPEEKSAVTALWG

SEQ ID NO: 6277 - protein, 9 aa, synthetic construct
  REGION 1..9: note = short peptide
RLKEDGGCT

SEQ ID NO: 6278 - protein, 8 aa, synthetic construct
  REGION 1..8: note = short peptide
AADCAHEL

SEQ ID NO: 6279 - protein, 11 aa, synthetic construct
  REGION 1..11: note = short peptide
GSRHPGFHQED

SEQ ID NO: 6280 - protein, 9 aa, synthetic construct
  REGION 1..9: note = short peptide
DHCRQMIMI

SEQ ID NO: 6281 - protein, 9 aa, synthetic construct
  REGION 1..9: note = short peptide
KVCGKVFSH

SEQ ID NO: 6282 - protein, 9 aa, synthetic construct
  REGION 1..9: note = short peptide
KSSDCVIKH

SEQ ID NO: 6283 - protein, 11 aa, synthetic construct
  REGION 1..11: note = short peptide
AVVGNGGILKK

SEQ ID NO: 6284 - protein, 9 aa, synthetic construct
  REGION 1..9: note = short peptide
LLETECPQY

SEQ ID NO: 6285 - protein, 11 aa, synthetic construct
  REGION 1..11: note = short peptide
AVKRQGRCDTY

SEQ ID NO: 6286 - protein, 8 aa, synthetic construct
  REGION 1..8: note = short peptide
IANINNCL

SEQ ID NO: 6287 - protein, 13 aa, synthetic construct
  REGION 1..13: note = short peptide
HWTSESSVSGSTG

SEQ ID NO: 6288 - protein, 8 aa, synthetic construct
  REGION 1..8: note = short peptide
DEHVVCKV

SEQ ID NO: 6289 - protein, 9 aa, synthetic construct
  REGION 1..9: note = short peptide
ETSRDLSHW

SEQ ID NO: 6290 - protein, 8 aa, synthetic construct
  REGION 1..8: note = short peptide
EEHEVCRY

SEQ ID NO: 6291 - protein, 11 aa, synthetic construct
  REGION 1..11: note = short peptide
KLWDVREGMCR

SEQ ID NO: 6292 - protein, 8 aa, synthetic construct
  REGION 1..8: note = short peptide
KLYKCIKK

SEQ ID NO: 6293 - protein, 9 aa, synthetic construct
  REGION 1..9: note = short peptide
KIFPALCTV

SEQ ID NO: 6294 - protein, 12 aa, synthetic construct
  REGION 1..12: note = short peptide
KISMPDVNLNLK

SEQ ID NO: 6295 - protein, 10 aa, synthetic construct
  REGION 1..10: note = short peptide
EAPSSTCVAR

SEQ ID NO: 6296 - protein, 9 aa, synthetic construct
  REGION 1..9: note = short peptide
ATDNVCHLF

SEQ ID NO: 6297 - protein, 9 aa, synthetic construct
  REGION 1..9: note = short peptide
APLNSFHAA

SEQ ID NO: 6298 - protein, 9 aa, synthetic construct
  REGION 1..9: note = short peptide
AEQACKEKL

SEQ ID NO: 6299 - protein, 12 aa, synthetic construct
  REGION 1..12: note = short peptide
ALQQNGAPGIAK

SEQ ID NO: 6300 - protein, 9 aa, synthetic construct
  REGION 1..9: note = short peptide
APFRSEVCF

SEQ ID NO: 6301 - protein, 9 aa, synthetic construct
  REGION 1..9: note = short peptide
MHVNAGEML

SEQ ID NO: 6302 - protein, 9 aa, synthetic construct
  REGION 1..9: note = short peptide
MHEALHNRF

SEQ ID NO: 6303 - protein, 9 aa, synthetic construct
  REGION 1..9: note = short peptide
MHVNTNANF

SEQ ID NO: 6304 - protein, 9 aa, synthetic construct
  REGION 1..9: note = short peptide
GLCSKTVEY

SEQ ID NO: 6305 - protein, 11 aa, synthetic construct
  REGION 1..11: note = short peptide
HHADLTCTTTL

SEQ ID NO: 6306 - protein, 9 aa, synthetic construct
  REGION 1..9: note = short peptide
GTCPKGWLY

SEQ ID NO: 6307 - protein, 9 aa, synthetic construct
  REGION 1..9: note = short peptide
LPCKDAPEL

SEQ ID NO: 6308 - protein, 9 aa, synthetic construct
  REGION 1..9: note = short peptide
ASGPGCRSW

SEQ ID NO: 6309 - protein, 8 aa, synthetic construct
  REGION 1..8: note = short peptide
GEATPVNL

SEQ ID NO: 6310 - protein, 9 aa, synthetic construct
  REGION 1..9: note = short peptide
LTDPEVTNY

SEQ ID NO: 6311 - protein, 13 aa, synthetic construct
  REGION 1..13: note = short peptide
LSHGSAQVKGHGK

SEQ ID NO: 6312 - protein, 8 aa, synthetic construct
  REGION 1..8: note = short peptide
LQFLIKVV

SEQ ID NO: 6313 - protein, 10 aa, synthetic construct
  REGION 1..10: note = short peptide
TKSINSANKF

SEQ ID NO: 6314 - protein, 10 aa, synthetic construct
  REGION 1..10: note = short peptide
TLTKYQVTVP

SEQ ID NO: 6315 - protein, 9 aa, synthetic construct
  REGION 1..9: note = short peptide
RLTDLCTKI

SEQ ID NO: 6316 - protein, 8 aa, synthetic construct
  REGION 1..8: note = short peptide
KYRKVLQL

SEQ ID NO: 6317 - protein, 10 aa, synthetic construct
  REGION 1..10: note = short peptide
GRGAQLFAKR

SEQ ID NO: 6318 - protein, 10 aa, synthetic construct
  REGION 1..10: note = short peptide
RSGEGFLCVF

SEQ ID NO: 6319 - protein, 11 aa, synthetic construct
  REGION 1..11: note = short peptide
GPRKLKTGGNF

SEQ ID NO: 6320 - protein, 9 aa, synthetic construct
  REGION 1..9: note = short peptide
RQPRGRPHR

SEQ ID NO: 6321 - protein, 8 aa, synthetic construct
  REGION 1..8: note = short peptide
RRKILTQR

SEQ ID NO: 6322 - protein, 9 aa, synthetic construct
  REGION 1..9: note = short peptide
CGPEHSTEL

SEQ ID NO: 6323 - protein, 14 aa, synthetic construct
  REGION 1..14: note = short peptide
QSSGSVGSSGISSI

SEQ ID NO: 6324 - protein, 8 aa, synthetic construct
  REGION 1..8: note = short peptide
KPLPQPVF

SEQ ID NO: 6325 - protein, 10 aa, synthetic construct
  REGION 1..10: note = short peptide
RALGAIQRQV

SEQ ID NO: 6326 - protein, 10 aa, synthetic construct
  REGION 1..10: note = short peptide
QQISRHQEQF

SEQ ID NO: 6327 - protein, 13 aa, synthetic construct
  REGION 1..13: note = short peptide
IGGTETTANTLSW

SEQ ID NO: 6328 - protein, 11 aa, synthetic construct
  REGION 1..11: note = short peptide
LAVNGRTELLH

SEQ ID NO: 6329 - protein, 10 aa, synthetic construct
  REGION 1..10: note = short peptide
TTDCLQLLAY

SEQ ID NO: 6330 - protein, 12 aa, synthetic construct
  REGION 1..12: note = short peptide
QLCNIPCSTDCI

SEQ ID NO: 6331 - protein, 11 aa, synthetic construct
  REGION 1..11: note = short peptide
RISKDLANICK

SEQ ID NO: 6332 - protein, 10 aa, synthetic construct
  REGION 1..10: note = short peptide
TPDLWKETVF

SEQ ID NO: 6333 - protein, 11 aa, synthetic construct
  REGION 1..11: note = short peptide
ATAGKDDCLLK

SEQ ID NO: 6334 - protein, 9 aa, synthetic construct
  REGION 1..9: note = short peptide
RDQVLKVCA

SEQ ID NO: 6335 - protein, 8 aa, synthetic construct
  REGION 1..8: note = short peptide
RGGNQYLR

SEQ ID NO: 6336 - protein, 11 aa, synthetic construct
  REGION 1..11: note = short peptide
REYQELLNVKM

SEQ ID NO: 6337 - protein, 9 aa, synthetic construct
  REGION 1..9: note = short peptide
DVIGDEICC

SEQ ID NO: 6338 - protein, 10 aa, synthetic construct
  REGION 1..10: note = short peptide
KQTARKATAW

SEQ ID NO: 6339 - protein, 9 aa, synthetic construct
  REGION 1..9: note = short peptide
DVKCPGCYK

SEQ ID NO: 6340 - protein, 9 aa, synthetic construct
  REGION 1..9: note = short peptide
DVLGDEICC

SEQ ID NO: 6341 - protein, 8 aa, synthetic construct
  REGION 1..8: note = short peptide
SHNLYTVL

SEQ ID NO: 6342 - protein, 10 aa, synthetic construct
  REGION 1..10: note = short peptide
FPHISQCEDL

SEQ ID NO: 6343 - protein, 10 aa, synthetic construct
  REGION 1..10: note = short peptide
STVHEILCKL

SEQ ID NO: 6344 - protein, 9 aa, synthetic construct
  REGION 1..9: note = short peptide
FLNQTGLDA

SEQ ID NO: 6345 - protein, 10 aa, synthetic construct
  REGION 1..10: note = short peptide
RYYEKPCCRR

SEQ ID NO: 6346 - protein, 10 aa, synthetic construct
  REGION 1..10: note = short peptide
RYCKNKPYPK

SEQ ID NO: 6347 - protein, 10 aa, synthetic construct
  REGION 1..10: note = short peptide
TAQKFNNLLK

SEQ ID NO: 6348 - protein, 8 aa, synthetic construct
  REGION 1..8: note = short peptide
TFDNSGNI

SEQ ID NO: 6349 - protein, 10 aa, synthetic construct
  REGION 1..10: note = short peptide
DEPDHDPVEI

SEQ ID NO: 6350 - protein, 11 aa, synthetic construct
  REGION 1..11: note = short peptide
RVLGPCSDILK

SEQ ID NO: 6351 - protein, 10 aa, synthetic construct
  REGION 1..10: note = short peptide
DEARNLHSKW

SEQ ID NO: 6352 - protein, 12 aa, synthetic construct
  REGION 1..12: note = short peptide
SGGSSCSQTPSR

SEQ ID NO: 6353 - protein, 10 aa, synthetic construct
  REGION 1..10: note = short peptide
SGLLNCSPAA

SEQ ID NO: 6354 - protein, 11 aa, synthetic construct
  REGION 1..11: note = short peptide
KWLEPLKNLRF

SEQ ID NO: 6355 - protein, 9 aa, synthetic construct
  REGION 1..9: note = short peptide
KVYNKLDSK

SEQ ID NO: 6356 - protein, 11 aa, synthetic construct
  REGION 1..11: note = short peptide
FPWEVPKKLKY

SEQ ID NO: 6357 - protein, 15 aa, synthetic construct
  REGION 1..15: note = short peptide
DRNTQIFKTNTQTYR

SEQ ID NO: 6358 - protein, 9 aa, synthetic construct
  REGION 1..9: note = short peptide
TAKLVNKVI

SEQ ID NO: 6359 - protein, 9 aa, synthetic construct
  REGION 1..9: note = short peptide
KLLCPQKLK

SEQ ID NO: 6360 - protein, 9 aa, synthetic construct
  REGION 1..9: note = short peptide
YLKTKFICV

SEQ ID NO: 6361 - protein, 13 aa, synthetic construct
  REGION 1..13: note = short peptide
LSQPKIVKWDRDM

SEQ ID NO: 6362 - protein, 8 aa, synthetic construct
  REGION 1..8: note = short peptide
KNVSVKDI

SEQ ID NO: 6363 - protein, 9 aa, synthetic construct
  REGION 1..9: note = short peptide
KAVSLFLCY

SEQ ID NO: 6364 - protein, 9 aa, synthetic construct
  REGION 1..9: note = short peptide
NLAKCIVSV

SEQ ID NO: 6365 - protein, 11 aa, synthetic construct
  REGION 1..11: note = short peptide
KSKLDAEVSKW

SEQ ID NO: 6366 - protein, 9 aa, synthetic construct
  REGION 1..9: note = short peptide
VKFINKIQY

SEQ ID NO: 6367 - protein, 9 aa, synthetic construct
  REGION 1..9: note = short peptide
LVDCSTEKY

SEQ ID NO: 6368 - protein, 10 aa, synthetic construct
  REGION 1..10: note = short peptide
KSVPWVPILK

SEQ ID NO: 6369 - protein, 11 aa, synthetic construct
  REGION 1..11: note = short peptide
VVFNQSNIHEY

SEQ ID NO: 6370 - protein, 11 aa, synthetic construct
  REGION 1..11: note = short peptide
VVFNQSNIHEY

SEQ ID NO: 6371 - protein, 10 aa, synthetic construct
  REGION 1..10: note = short peptide
MPANGETVTL

SEQ ID NO: 6372 - protein, 12 aa, synthetic construct
  REGION 1..12: note = short peptide
KKHQGVSKTQSL

SEQ ID NO: 6373 - protein, 11 aa, synthetic construct
  REGION 1..11: note = short peptide
KKTAKLHVAVK

SEQ ID NO: 6374 - protein, 9 aa, synthetic construct
  REGION 1..9: note = short peptide
MPNASFSTL

SEQ ID NO: 6375 - protein, 9 aa, synthetic construct
  REGION 1..9: note = short peptide
KHAKGNLQL

SEQ ID NO: 6376 - protein, 8 aa, synthetic construct
  REGION 1..8: note = short peptide
PRVLKQVH

SEQ ID NO: 6377 - protein, 15 aa, synthetic construct
  REGION 1..15: note = short peptide
LQKKLVPFATELHER

SEQ ID NO: 6378 - protein, 9 aa, synthetic construct
  REGION 1..9: note = short peptide
PQEEALQRL

SEQ ID NO: 6379 - protein, 8 aa, synthetic construct
  REGION 1..8: note = short peptide
KNSIHEKF

SEQ ID NO: 6380 - protein, 11 aa, synthetic construct
  REGION 1..11: note = short peptide
YSECQNAAQIY

SEQ ID NO: 6381 - protein, 9 aa, synthetic construct
  REGION 1..9: note = short peptide
PNPLKLSSL

SEQ ID NO: 6382 - protein, 10 aa, synthetic construct
  REGION 1..10: note = short peptide
KALLHIFSGK

SEQ ID NO: 6383 - protein, 9 aa, synthetic construct
  REGION 1..9: note = short peptide
NSIGRGAGF

SEQ ID NO: 6384 - protein, 11 aa, synthetic construct
  REGION 1..11: note = short peptide
NSIGRGAGFER

SEQ ID NO: 6385 - protein, 8 aa, synthetic construct
  REGION 1..8: note = short peptide
KANAKQRK

SEQ ID NO: 6386 - protein, 12 aa, synthetic construct
  REGION 1..12: note = short peptide
NQSEAGSHIIQR

SEQ ID NO: 6387 - protein, 9 aa, synthetic construct
  REGION 1..9: note = short peptide
LNVGGSLYY

SEQ ID NO: 6388 - protein, 9 aa, synthetic construct
  REGION 1..9: note = short peptide
NWVFGEVLC

SEQ ID NO: 6389 - protein, 9 aa, synthetic construct
  REGION 1..9: note = short peptide
LNIIPLIPP

SEQ ID NO: 6390 - protein, 9 aa, synthetic construct
  REGION 1..9: note = short peptide
LNRKGGGNL

SEQ ID NO: 6391 - protein, 10 aa, synthetic construct
  REGION 1..10: note = short peptide
NTLPVRNVLD

SEQ ID NO: 6392 - protein, 8 aa, synthetic construct
  REGION 1..8: note = short peptide
YVNCGHVT

SEQ ID NO: 6393 - protein, 8 aa, synthetic construct
  REGION 1..8: note = short peptide
YVNCGHVT

SEQ ID NO: 6394 - protein, 12 aa, synthetic construct
  REGION 1..12: note = short peptide
NSDCYFGNGSAY

SEQ ID NO: 6395 - protein, 12 aa, synthetic construct
  REGION 1..12: note = short peptide
NSDCYFGNGSAY

SEQ ID NO: 6396 - protein, 10 aa, synthetic construct
  REGION 1..10: note = short peptide
SLANLTCDQL

SEQ ID NO: 6397 - protein, 10 aa, synthetic construct
  REGION 1..10: note = short peptide
SLANLTCDQL

SEQ ID NO: 6398 - protein, 9 aa, synthetic construct
  REGION 1..9: note = short peptide
DVQKKNCSL

SEQ ID NO: 6399 - protein, 9 aa, synthetic construct
  REGION 1..9: note = short peptide
DVQKKNCSL

SEQ ID NO: 6400 - protein, 11 aa, synthetic construct
  REGION 1..11: note = short peptide
VHNITVCEQKI

SEQ ID NO: 6401 - protein, 11 aa, synthetic construct
  REGION 1..11: note = short peptide
VHNITVCEQKI

SEQ ID NO: 6402 - protein, 11 aa, synthetic construct
  REGION 1..11: note = short peptide
GTCHNLPGLFR

SEQ ID NO: 6403 - protein, 11 aa, synthetic construct
  REGION 1..11: note = short peptide
GTCHNLPGLFR

SEQ ID NO: 6404 - protein, 10 aa, synthetic construct
  REGION 1..10: note = short peptide
GTCEDASLCK

SEQ ID NO: 6405 - protein, 10 aa, synthetic construct
  REGION 1..10: note = short peptide
GTCEDASLCK

SEQ ID NO: 6406 - protein, 9 aa, synthetic construct
  REGION 1..9: note = short peptide
GNKGCNGGF

SEQ ID NO: 6407 - protein, 9 aa, synthetic construct
  REGION 1..9: note = short peptide
GNKGCNGGF

SEQ ID NO: 6408 - protein, 8 aa, synthetic construct
  REGION 1..8: note = short peptide
WFYYQYLL

SEQ ID NO: 6409 - protein, 8 aa, synthetic construct
  REGION 1..8: note = short peptide
WFYYQYLL

SEQ ID NO: 6410 - protein, 9 aa, synthetic construct
  REGION 1..9: note = short peptide
CVEPNCRSK

SEQ ID NO: 6411 - protein, 9 aa, synthetic construct
  REGION 1..9: note = short peptide
CVEPNCRSK

SEQ ID NO: 6412 - protein, 13 aa, synthetic construct
  REGION 1..13: note = short peptide
KLNISFPATGCQK

SEQ ID NO: 6413 - protein, 13 aa, synthetic construct
  REGION 1..13: note = short peptide
KLNISFPATGCQK

SEQ ID NO: 6414 - protein, 10 aa, synthetic construct
  REGION 1..10: note = short peptide
KTCEESSFCK

SEQ ID NO: 6415 - protein, 10 aa, synthetic construct
  REGION 1..10: note = short peptide
KTCEESSFCK

SEQ ID NO: 6416 - protein, 13 aa, synthetic construct
  REGION 1..13: note = short peptide
TGTKNTVCSGVTG

SEQ ID NO: 6417 - protein, 13 aa, synthetic construct
  REGION 1..13: note = short peptide
TGTKNTVCSGVTG

SEQ ID NO: 6418 - protein, 11 aa, synthetic construct
  REGION 1..11: note = short peptide
KILCIEKCFTF

SEQ ID NO: 6419 - protein, 11 aa, synthetic construct
  REGION 1..11: note = short peptide
KILCIEKCFTF

SEQ ID NO: 6420 - protein, 10 aa, synthetic construct
  REGION 1..10: note = short peptide
KIISKNCTSY

SEQ ID NO: 6421 - protein, 10 aa, synthetic construct
  REGION 1..10: note = short peptide
KIISKNCTSY

SEQ ID NO: 6422 - protein, 9 aa, synthetic construct
  REGION 1..9: note = short peptide
VHDCVNITI

SEQ ID NO: 6423 - protein, 9 aa, synthetic construct
  REGION 1..9: note = short peptide
VHDCVNITI

SEQ ID NO: 6424 - protein, 9 aa, synthetic construct
  REGION 1..9: note = short peptide
RIKKGSHRW

SEQ ID NO: 6425 - protein, 9 aa, synthetic construct
  REGION 1..9: note = short peptide
RIKKGSHRW

SEQ ID NO: 6426 - protein, 13 aa, synthetic construct
  REGION 1..13: note = short peptide
HWTSESSVSGSTG

SEQ ID NO: 6427 - protein, 13 aa, synthetic construct
  REGION 1..13: note = short peptide
HWTSESSVSGSTG

SEQ ID NO: 6428 - protein, 9 aa, synthetic construct
  REGION 1..9: note = short peptide
ETSRDLSHW

SEQ ID NO: 6429 - protein, 9 aa, synthetic construct
  REGION 1..9: note = short peptide
ETSRDLSHW

SEQ ID NO: 6430 - protein, 11 aa, synthetic construct
  REGION 1..11: note = short peptide
KSLGVPGDASY

SEQ ID NO: 6431 - protein, 13 aa, synthetic construct
  REGION 1..13: note = short peptide
ADKVLKEKRKLFI

SEQ ID NO: 6432 - protein, 10 aa, synthetic construct
  REGION 1..10: note = short peptide
SVVEKMLTNW

SEQ ID NO: 6433 - protein, 10 aa, synthetic construct
  REGION 1..10: note = short peptide
DVLHQIFSKF

SEQ ID NO: 6434 - protein, 8 aa, synthetic construct
  REGION 1..8: note = short peptide
AAAVRQDL

SEQ ID NO: 6435 - protein, 9 aa, synthetic construct
  REGION 1..9: note = short peptide
TAAAPKAGP

SEQ ID NO: 6436 - protein, 9 aa, synthetic construct
  REGION 1..9: note = short peptide
AAACRSVKG

SEQ ID NO: 6437 - protein, 9 aa, synthetic construct
  REGION 1..9: note = short peptide
TAAAPMIGY

SEQ ID NO: 6438 - protein, 10 aa, synthetic construct
  REGION 1..10: note = short peptide
DLVNRSIAQM

SEQ ID NO: 6439 - protein, 11 aa, synthetic construct
  REGION 1..11: note = short peptide
TAAIDLETDNL

SEQ ID NO: 6440 - protein, 15 aa, synthetic construct
  REGION 1..15: note = short peptide
EGDKYKLSKKELKEL

SEQ ID NO: 6441 - protein, 9 aa, synthetic construct
  REGION 1..9: note = short peptide
SRFPMPRYI

SEQ ID NO: 6442 - protein, 9 aa, synthetic construct
  REGION 1..9: note = short peptide
SRFKAIEKM

SEQ ID NO: 6443 - protein, 9 aa, synthetic construct
  REGION 1..9: note = short peptide
SRFDIPLGL

SEQ ID NO: 6444 - protein, 10 aa, synthetic construct
  REGION 1..10: note = short peptide
TAAQITQRKW

SEQ ID NO: 6445 - protein, 15 aa, synthetic construct
  REGION 1..15: note = short peptide
EGFPVRLPFQGFIDR

SEQ ID NO: 6446 - protein, 13 aa, synthetic construct
  REGION 1..13: note = short peptide
SYYETSKMKVLKF

SEQ ID NO: 6447 - protein, 8 aa, synthetic construct
  REGION 1..8: note = short peptide
KSSLINGL

SEQ ID NO: 6448 - protein, 10 aa, synthetic construct
  REGION 1..10: note = short peptide
KVGMKHYHLK

SEQ ID NO: 6449 - protein, 9 aa, synthetic construct
  REGION 1..9: note = short peptide
YVANEFLKY

SEQ ID NO: 6450 - protein, 11 aa, synthetic construct
  REGION 1..11: note = short peptide
YFGQGRGGGGY

SEQ ID NO: 6451 - protein, 11 aa, synthetic construct
  REGION 1..11: note = short peptide
KSSQKESAVQR

SEQ ID NO: 6452 - protein, 10 aa, synthetic construct
  REGION 1..10: note = short peptide
YECPQCGKTF

SEQ ID NO: 6453 - protein, 10 aa, synthetic construct
  REGION 1..10: note = short peptide
AAARQPAPAI

SEQ ID NO: 6454 - protein, 11 aa, synthetic construct
  REGION 1..11: note = short peptide
SRMKKEASVKF

SEQ ID NO: 6455 - protein, 10 aa, synthetic construct
  REGION 1..10: note = short peptide
YDCPECGKAF

SEQ ID NO: 6456 - protein, 14 aa, synthetic construct
  REGION 1..14: note = short peptide
YVGDEAQSKRGVLT

SEQ ID NO: 6457 - protein, 10 aa, synthetic construct
  REGION 1..10: note = short peptide
YVIDPIKGLK

SEQ ID NO: 6458 - protein, 9 aa, synthetic construct
  REGION 1..9: note = short peptide
DPDSGLLVL

SEQ ID NO: 6459 - protein, 10 aa, synthetic construct
  REGION 1..10: note = short peptide
YVIPTIPSPF

SEQ ID NO: 6460 - protein, 9 aa, synthetic construct
  REGION 1..9: note = short peptide
SRHSLDMKF

SEQ ID NO: 6461 - protein, 9 aa, synthetic construct
  REGION 1..9: note = short peptide
YAVTGDVKM

SEQ ID NO: 6462 - protein, 9 aa, synthetic construct
  REGION 1..9: note = short peptide
ADYNGRLAA

SEQ ID NO: 6463 - protein, 9 aa, synthetic construct
  REGION 1..9: note = short peptide
DMKTKYFFF

SEQ ID NO: 6464 - protein, 12 aa, synthetic construct
  REGION 1..12: note = short peptide
YASSPGGVYATR

SEQ ID NO: 6465 - protein, 9 aa, synthetic construct
  REGION 1..9: note = short peptide
KSSSLGNLK

SEQ ID NO: 6466 - protein, 11 aa, synthetic construct
  REGION 1..11: note = short peptide
KVKIPEELKPW

SEQ ID NO: 6467 - protein, 13 aa, synthetic construct
  REGION 1..13: note = short peptide
ADAASQVLLGSGL

SEQ ID NO: 6468 - protein, 9 aa, synthetic construct
  REGION 1..9: note = short peptide
EAGSHIIQR

SEQ ID NO: 6469 - protein, 14 aa, synthetic construct
  REGION 1..14: note = short peptide
EADGPGSGGGEEAM

SEQ ID NO: 6470 - protein, 11 aa, synthetic construct
  REGION 1..11: note = short peptide
KVKSSPLIEKL

SEQ ID NO: 6471 - protein, 10 aa, synthetic construct
  REGION 1..10: note = short peptide
DYISAKPLEM

SEQ ID NO: 6472 - protein, 14 aa, synthetic construct
  REGION 1..14: note = short peptide
SRQVVRSSKFRHVF

SEQ ID NO: 6473 - protein, 15 aa, synthetic construct
  REGION 1..15: note = short peptide
SSSHHPGIAEFPSRG

SEQ ID NO: 6474 - protein, 10 aa, synthetic construct
  REGION 1..10: note = short peptide
YPDPSKQKPM

SEQ ID NO: 6475 - protein, 15 aa, synthetic construct
  REGION 1..15: note = short peptide
YRQDAYDGKDYIALK

SEQ ID NO: 6476 - protein, 15 aa, synthetic construct
  REGION 1..15: note = short peptide
YRQDAYDGKDYIALK

SEQ ID NO: 6477 - protein, 9 aa, synthetic construct
  REGION 1..9: note = short peptide
DVVGDVYVL

SEQ ID NO: 6478 - protein, 11 aa, synthetic construct
  REGION 1..11: note = short peptide
KVKSYIHEVAR

SEQ ID NO: 6479 - protein, 11 aa, synthetic construct
  REGION 1..11: note = short peptide
YNRGDSTFESK

SEQ ID NO: 6480 - protein, 11 aa, synthetic construct
  REGION 1..11: note = short peptide
KVKTPEMIIQK

SEQ ID NO: 6481 - protein, 11 aa, synthetic construct
  REGION 1..11: note = short peptide
DVAEGDLIEHF

SEQ ID NO: 6482 - protein, 12 aa, synthetic construct
  REGION 1..12: note = short peptide
EAPLELQPPSGE

SEQ ID NO: 6483 - protein, 10 aa, synthetic construct
  REGION 1..10: note = short peptide
EAKQPNSAIR

SEQ ID NO: 6484 - protein, 13 aa, synthetic construct
  REGION 1..13: note = short peptide
AAQGEPQVQFKLV

SEQ ID NO: 6485 - protein, 8 aa, synthetic construct
  REGION 1..8: note = short peptide
ADDVLRAP

SEQ ID NO: 6486 - protein, 10 aa, synthetic construct
  REGION 1..10: note = short peptide
EAIKILKGEY

SEQ ID NO: 6487 - protein, 11 aa, synthetic construct
  REGION 1..11: note = short peptide
SSPGTSDMKDL

SEQ ID NO: 6488 - protein, 9 aa, synthetic construct
  REGION 1..9: note = short peptide
DVVFLITKY

SEQ ID NO: 6489 - protein, 9 aa, synthetic construct
  REGION 1..9: note = short peptide
DVIRLIMQY

SEQ ID NO: 6490 - protein, 9 aa, synthetic construct
  REGION 1..9: note = short peptide
STIANSSKK

SEQ ID NO: 6491 - protein, 15 aa, synthetic construct
  REGION 1..15: note = short peptide
STIADKYSAESSQKK

SEQ ID NO: 6492 - protein, 13 aa, synthetic construct
  REGION 1..13: note = short peptide
STAVIENPEMLKY

SEQ ID NO: 6493 - protein, 14 aa, synthetic construct
  REGION 1..14: note = short peptide
YPYNNTADGVYKVF

SEQ ID NO: 6494 - protein, 10 aa, synthetic construct
  REGION 1..10: note = short peptide
STDPSVLGKY

SEQ ID NO: 6495 - protein, 11 aa, synthetic construct
  REGION 1..11: note = short peptide
DVMDSTTTQKY

SEQ ID NO: 6496 - protein, 14 aa, synthetic construct
  REGION 1..14: note = short peptide
AATTAAPAAAAAPA

SEQ ID NO: 6497 - protein, 9 aa, synthetic construct
  REGION 1..9: note = short peptide
DVHKKYNAL

SEQ ID NO: 6498 - protein, 15 aa, synthetic construct
  REGION 1..15: note = short peptide
STPTLVEVSRNLGKV

SEQ ID NO: 6499 - protein, 15 aa, synthetic construct
  REGION 1..15: note = short peptide
YRFQLQATTKEGPGE

SEQ ID NO: 6500 - protein, 12 aa, synthetic construct
  REGION 1..12: note = short peptide
DVVDEKISAMGK

SEQ ID NO: 6501 - protein, 9 aa, synthetic construct
  REGION 1..9: note = short peptide
KRVFPKWTY

SEQ ID NO: 6502 - protein, 13 aa, synthetic construct
  REGION 1..13: note = short peptide
AAVKTLNPKAEVA

SEQ ID NO: 6503 - protein, 9 aa, synthetic construct
  REGION 1..9: note = short peptide
DVTNVIQKM

SEQ ID NO: 6504 - protein, 9 aa, synthetic construct
  REGION 1..9: note = short peptide
DVQHFKVLR

SEQ ID NO: 6505 - protein, 9 aa, synthetic construct
  REGION 1..9: note = short peptide
DVIGDEICC

SEQ ID NO: 6506 - protein, 9 aa, synthetic construct
  REGION 1..9: note = short peptide
STNDTNAKY

SEQ ID NO: 6507 - protein, 8 aa, synthetic construct
  REGION 1..8: note = short peptide
SVDQPLKI

SEQ ID NO: 6508 - protein, 13 aa, synthetic construct
  REGION 1..13: note = short peptide
EEEIAALVIDNGS

SEQ ID NO: 6509 - protein, 8 aa, synthetic construct
  REGION 1..8: note = short peptide
SVRYSSSK

SEQ ID NO: 6510 - protein, 14 aa, synthetic construct
  REGION 1..14: note = short peptide
SSAHFNRGPAYGLS

SEQ ID NO: 6511 - protein, 14 aa, synthetic construct
  REGION 1..14: note = short peptide
DSGHRGYSGSQASD

SEQ ID NO: 6512 - protein, 15 aa, synthetic construct
  REGION 1..15: note = short peptide
DSLDYAKKNEPKHRL

SEQ ID NO: 6513 - protein, 13 aa, synthetic construct
  REGION 1..13: note = short peptide
SVQQNGSIYIHVY

SEQ ID NO: 6514 - protein, 11 aa, synthetic construct
  REGION 1..11: note = short peptide
SVQPSSSLSAR

SEQ ID NO: 6515 - protein, 10 aa, synthetic construct
  REGION 1..10: note = short peptide
SVPSPTSATK

SEQ ID NO: 6516 - protein, 9 aa, synthetic construct
  REGION 1..9: note = short peptide
YIQDRIPSW

SEQ ID NO: 6517 - protein, 15 aa, synthetic construct
  REGION 1..15: note = short peptide
EEEIAALVIDNGSGM

SEQ ID NO: 6518 - protein, 9 aa, synthetic construct
  REGION 1..9: note = short peptide
AAGKRSYVL

SEQ ID NO: 6519 - protein, 9 aa, synthetic construct
  REGION 1..9: note = short peptide
EEKMAYQEY

SEQ ID NO: 6520 - protein, 8 aa, synthetic construct
  REGION 1..8: note = short peptide
AAGAGAAK

SEQ ID NO: 6521 - protein, 10 aa, synthetic construct
  REGION 1..10: note = short peptide
SVSTVLTSKY

SEQ ID NO: 6522 - protein, 9 aa, synthetic construct
  REGION 1..9: note = short peptide
SRSGIILRS

SEQ ID NO: 6523 - protein, 10 aa, synthetic construct
  REGION 1..10: note = short peptide
SVSLSKSVSI

SEQ ID NO: 6524 - protein, 9 aa, synthetic construct
  REGION 1..9: note = short peptide
SRSPEPSPR

SEQ ID NO: 6525 - protein, 8 aa, synthetic construct
  REGION 1..8: note = short peptide
YTDKIMTY

SEQ ID NO: 6526 - protein, 9 aa, synthetic construct
  REGION 1..9: note = short peptide
DTDEYVLKY

SEQ ID NO: 6527 - protein, 8 aa, synthetic construct
  REGION 1..8: note = short peptide
AAPPLPAY

SEQ ID NO: 6528 - protein, 10 aa, synthetic construct
  REGION 1..10: note = short peptide
DTFGPRAQGW

SEQ ID NO: 6529 - protein, 9 aa, synthetic construct
  REGION 1..9: note = short peptide
SVGAISLAF

SEQ ID NO: 6530 - protein, 9 aa, synthetic construct
  REGION 1..9: note = short peptide
KRSAISAAK

SEQ ID NO: 6531 - protein, 13 aa, synthetic construct
  REGION 1..13: note = short peptide
ADGGGPKDAPSLR

SEQ ID NO: 6532 - protein, 13 aa, synthetic construct
  REGION 1..13: note = short peptide
KVKADQDSEAMKR

SEQ ID NO: 6533 - protein, 9 aa, synthetic construct
  REGION 1..9: note = short peptide
DTISKMNDF

SEQ ID NO: 6534 - protein, 11 aa, synthetic construct
  REGION 1..11: note = short peptide
SSKGSFADLGL

SEQ ID NO: 6535 - protein, 15 aa, synthetic construct
  REGION 1..15: note = short peptide
YLKQLLSDKQQKRQS

SEQ ID NO: 6536 - protein, 9 aa, synthetic construct
  REGION 1..9: note = short peptide
KSQAFNMKQ

SEQ ID NO: 6537 - protein, 9 aa, synthetic construct
  REGION 1..9: note = short peptide
YKAGLIFRY

SEQ ID NO: 6538 - protein, 12 aa, synthetic construct
  REGION 1..12: note = short peptide
SSHHPGIAEFPS

SEQ ID NO: 6539 - protein, 14 aa, synthetic construct
  REGION 1..14: note = short peptide
DSQQESETPDPSGG

SEQ ID NO: 6540 - protein, 12 aa, synthetic construct
  REGION 1..12: note = short peptide
YSTQTAQTLKQK

SEQ ID NO: 6541 - protein, 8 aa, synthetic construct
  REGION 1..8: note = short peptide
EDVPRPPD

SEQ ID NO: 6542 - protein, 10 aa, synthetic construct
  REGION 1..10: note = short peptide
SSEELLSLKY

SEQ ID NO: 6543 - protein, 9 aa, synthetic construct
  REGION 1..9: note = short peptide
YSQADALKY

SEQ ID NO: 6544 - protein, 10 aa, synthetic construct
  REGION 1..10: note = short peptide
SVLDYFHIAP

SEQ ID NO: 6545 - protein, 13 aa, synthetic construct
  REGION 1..13: note = short peptide
KSPREPGYKAEGK

SEQ ID NO: 6546 - protein, 15 aa, synthetic construct
  REGION 1..15: note = short peptide
WAAEVISNARENIQR

SEQ ID NO: 6547 - protein, 8 aa, synthetic construct
  REGION 1..8: note = short peptide
DAYVLPVK

SEQ ID NO: 6548 - protein, 10 aa, synthetic construct
  REGION 1..10: note = short peptide
VDVQGPDWHL

SEQ ID NO: 6549 - protein, 10 aa, synthetic construct
  REGION 1..10: note = short peptide
VDVQGPDWHL

SEQ ID NO: 6550 - protein, 9 aa, synthetic construct
  REGION 1..9: note = short peptide
TPMNPANTI

SEQ ID NO: 6551 - protein, 12 aa, synthetic construct
  REGION 1..12: note = short peptide
TPLTTLLPGDLL

SEQ ID NO: 6552 - protein, 9 aa, synthetic construct
  REGION 1..9: note = short peptide
ASSSIAAKM

SEQ ID NO: 6553 - protein, 10 aa, synthetic construct
  REGION 1..10: note = short peptide
TPLQFININY

SEQ ID NO: 6554 - protein, 15 aa, synthetic construct
  REGION 1..15: note = short peptide
TPLPRSWSPKDKYNY

SEQ ID NO: 6555 - protein, 12 aa, synthetic construct
  REGION 1..12: note = short peptide
ASVSTVLTSKYR

SEQ ID NO: 6556 - protein, 9 aa, synthetic construct
  REGION 1..9: note = short peptide
KTRTPLRQR

SEQ ID NO: 6557 - protein, 13 aa, synthetic construct
  REGION 1..13: note = short peptide
ATAEVLNIGKKLY

SEQ ID NO: 6558 - protein, 12 aa, synthetic construct
  REGION 1..12: note = short peptide
ATAGDGLIELRK

SEQ ID NO: 6559 - protein, 12 aa, synthetic construct
  REGION 1..12: note = short peptide
VETGVLKPGMVV

SEQ ID NO: 6560 - protein, 9 aa, synthetic construct
  REGION 1..9: note = short peptide
ATANSIIVL

SEQ ID NO: 6561 - protein, 9 aa, synthetic construct
  REGION 1..9: note = short peptide
TPGAYLLSV

SEQ ID NO: 6562 - protein, 10 aa, synthetic construct
  REGION 1..10: note = short peptide
TPFNTREPVM

SEQ ID NO: 6563 - protein, 10 aa, synthetic construct
  REGION 1..10: note = short peptide
VDVHGPDWHL

SEQ ID NO: 6564 - protein, 9 aa, synthetic construct
  REGION 1..9: note = short peptide
APESPPQTI

SEQ ID NO: 6565 - protein, 12 aa, synthetic construct
  REGION 1..12: note = short peptide
ASSEVARHLLFQ

SEQ ID NO: 6566 - protein, 9 aa, synthetic construct
  REGION 1..9: note = short peptide
ASIQKAQSL

SEQ ID NO: 6567 - protein, 13 aa, synthetic construct
  REGION 1..13: note = short peptide
ASKCPKCDKTVYF

SEQ ID NO: 6568 - protein, 9 aa, synthetic construct
  REGION 1..9: note = short peptide
ASKEPYYVR

SEQ ID NO: 6569 - protein, 8 aa, synthetic construct
  REGION 1..8: note = short peptide
TQLFSLNP

SEQ ID NO: 6570 - protein, 10 aa, synthetic construct
  REGION 1..10: note = short peptide
KSAPSTGGVK

SEQ ID NO: 6571 - protein, 14 aa, synthetic construct
  REGION 1..14: note = short peptide
TQIFKTNTQTYRES

SEQ ID NO: 6572 - protein, 9 aa, synthetic construct
  REGION 1..9: note = short peptide
ASMNHTKAL

SEQ ID NO: 6573 - protein, 9 aa, synthetic construct
  REGION 1..9: note = short peptide
TPVTSAPAL

SEQ ID NO: 6574 - protein, 10 aa, synthetic construct
  REGION 1..10: note = short peptide
APGGKTLALL

SEQ ID NO: 6575 - protein, 15 aa, synthetic construct
  REGION 1..15: note = short peptide
TPRGNYNESRGGQSN

SEQ ID NO: 6576 - protein, 9 aa, synthetic construct
  REGION 1..9: note = short peptide
TPVDDPMSL

SEQ ID NO: 6577 - protein, 9 aa, synthetic construct
  REGION 1..9: note = short peptide
TPSALKFAY

SEQ ID NO: 6578 - protein, 11 aa, synthetic construct
  REGION 1..11: note = short peptide
ASRLLLNNGAK

SEQ ID NO: 6579 - protein, 11 aa, synthetic construct
  REGION 1..11: note = short peptide
ASSDIQVKELE

SEQ ID NO: 6580 - protein, 8 aa, synthetic construct
  REGION 1..8: note = short peptide
VDSKVKAF

SEQ ID NO: 6581 - protein, 11 aa, synthetic construct
  REGION 1..11: note = short peptide
ASSEVARHLLF

SEQ ID NO: 6582 - protein, 8 aa, synthetic construct
  REGION 1..8: note = short peptide
APAHGSVL

SEQ ID NO: 6583 - protein, 9 aa, synthetic construct
  REGION 1..9: note = short peptide
TMDPKPLAY

SEQ ID NO: 6584 - protein, 8 aa, synthetic construct
  REGION 1..8: note = short peptide
TMAIERAL

SEQ ID NO: 6585 - protein, 15 aa, synthetic construct
  REGION 1..15: note = short peptide
ALSDADVQKQIKHMM

SEQ ID NO: 6586 - protein, 10 aa, synthetic construct
  REGION 1..10: note = short peptide
ATSDKMQHFK

SEQ ID NO: 6587 - protein, 11 aa, synthetic construct
  REGION 1..11: note = short peptide
TLVDTGIGMTK

SEQ ID NO: 6588 - protein, 9 aa, synthetic construct
  REGION 1..9: note = short peptide
TLSVIVSPV

SEQ ID NO: 6589 - protein, 9 aa, synthetic construct
  REGION 1..9: note = short peptide
KSGPPELRK

SEQ ID NO: 6590 - protein, 11 aa, synthetic construct
  REGION 1..11: note = short peptide
ATVVQGFPMFK

SEQ ID NO: 6591 - protein, 9 aa, synthetic construct
  REGION 1..9: note = short peptide
TLPRPRPVP

SEQ ID NO: 6592 - protein, 11 aa, synthetic construct
  REGION 1..11: note = short peptide
TLNVASRPSLI

SEQ ID NO: 6593 - protein, 8 aa, synthetic construct
  REGION 1..8: note = short peptide
TLLPPLLP

SEQ ID NO: 6594 - protein, 10 aa, synthetic construct
  REGION 1..10: note = short peptide
KSGRADLAAI

SEQ ID NO: 6595 - protein, 10 aa, synthetic construct
  REGION 1..10: note = short peptide
ATDELATKLS

SEQ ID NO: 6596 - protein, 9 aa, synthetic construct
  REGION 1..9: note = short peptide
KTLPGGAGK

SEQ ID NO: 6597 - protein, 12 aa, synthetic construct
  REGION 1..12: note = short peptide
VFLPEPMGTANI

SEQ ID NO: 6598 - protein, 8 aa, synthetic construct
  REGION 1..8: note = short peptide
TNVDKLVK

SEQ ID NO: 6599 - protein, 9 aa, synthetic construct
  REGION 1..9: note = short peptide
ANKVGRFSV

SEQ ID NO: 6600 - protein, 9 aa, synthetic construct
  REGION 1..9: note = short peptide
TMNIKSATW

SEQ ID NO: 6601 - protein, 8 aa, synthetic construct
  REGION 1..8: note = short peptide
ANFHPDGR

SEQ ID NO: 6602 - protein, 9 aa, synthetic construct
  REGION 1..9: note = short peptide
VARPAPVAV

SEQ ID NO: 6603 - protein, 9 aa, synthetic construct
  REGION 1..9: note = short peptide
VARKDLIVM

SEQ ID NO: 6604 - protein, 9 aa, synthetic construct
  REGION 1..9: note = short peptide
VAPRAFAHI

SEQ ID NO: 6605 - protein, 10 aa, synthetic construct
  REGION 1..10: note = short peptide
VAPGNVRVNV

SEQ ID NO: 6606 - protein, 14 aa, synthetic construct
  REGION 1..14: note = short peptide
TTNSSDPFLNSGTY

SEQ ID NO: 6607 - protein, 10 aa, synthetic construct
  REGION 1..10: note = short peptide
TTNNTAINFY

SEQ ID NO: 6608 - protein, 10 aa, synthetic construct
  REGION 1..10: note = short peptide
KTNMPIITSK

SEQ ID NO: 6609 - protein, 8 aa, synthetic construct
  REGION 1..8: note = short peptide
TTKVKKSP

SEQ ID NO: 6610 - protein, 10 aa, synthetic construct
  REGION 1..10: note = short peptide
TTKQTQKISL

SEQ ID NO: 6611 - protein, 11 aa, synthetic construct
  REGION 1..11: note = short peptide
KSAPSTGGVKK

SEQ ID NO: 6612 - protein, 10 aa, synthetic construct
  REGION 1..10: note = short peptide
TTHEGFNVTL

SEQ ID NO: 6613 - protein, 13 aa, synthetic construct
  REGION 1..13: note = short peptide
TTFTGHTGDVMSL

SEQ ID NO: 6614 - protein, 11 aa, synthetic construct
  REGION 1..11: note = short peptide
KTNLDFKVPNG

SEQ ID NO: 6615 - protein, 10 aa, synthetic construct
  REGION 1..10: note = short peptide
TVQTVAAPQV

SEQ ID NO: 6616 - protein, 11 aa, synthetic construct
  REGION 1..11: note = short peptide
KSAPSTGGVKK

SEQ ID NO: 6617 - protein, 11 aa, synthetic construct
  REGION 1..11: note = short peptide
APRPAAAAATA

SEQ ID NO: 6618 - protein, 9 aa, synthetic construct
  REGION 1..9: note = short peptide
APRLPLPHV

SEQ ID NO: 6619 - protein, 10 aa, synthetic construct
  REGION 1..10: note = short peptide
AQNEGKAMSY

SEQ ID NO: 6620 - protein, 8 aa, synthetic construct
  REGION 1..8: note = short peptide
TTPAATNI

SEQ ID NO: 6621 - protein, 10 aa, synthetic construct
  REGION 1..10: note = short peptide
AQKSGKEQQL

SEQ ID NO: 6622 - protein, 10 aa, synthetic construct
  REGION 1..10: note = short peptide
TTTPKGGTPA

SEQ ID NO: 6623 - protein, 11 aa, synthetic construct
  REGION 1..11: note = short peptide
KSAPSTGGVKK

SEQ ID NO: 6624 - protein, 8 aa, synthetic construct
  REGION 1..8: note = short peptide
AQFVRNLV

SEQ ID NO: 6625 - protein, 11 aa, synthetic construct
  REGION 1..11: note = short peptide
KSAPSTGGVKK

SEQ ID NO: 6626 - protein, 9 aa, synthetic construct
  REGION 1..9: note = short peptide
TVGPPPPPQ

SEQ ID NO: 6627 - protein, 13 aa, synthetic construct
  REGION 1..13: note = short peptide
TVAAGTMTGMLYK

SEQ ID NO: 6628 - protein, 9 aa, synthetic construct
  REGION 1..9: note = short peptide
TTVTSKVAP

SEQ ID NO: 6629 - protein, 15 aa, synthetic construct
  REGION 1..15: note = short peptide
TTVGPASSSPKIALK

SEQ ID NO: 6630 - protein, 8 aa, synthetic construct
  REGION 1..8: note = short peptide
TVHLAIHP

SEQ ID NO: 6631 - protein, 15 aa, synthetic construct
  REGION 1..15: note = short peptide
AQGPPGATGFPGAAG

SEQ ID NO: 6632 - protein, 14 aa, synthetic construct
  REGION 1..14: note = short peptide
TTTTPGRKPRGRPK

SEQ ID NO: 6633 - protein, 15 aa, synthetic construct
  REGION 1..15: note = short peptide
TVIKAPTSFGYDKPH

SEQ ID NO: 6634 - protein, 11 aa, synthetic construct
  REGION 1..11: note = short peptide
KSAPSTGGVKK

SEQ ID NO: 6635 - protein, 15 aa, synthetic construct
  REGION 1..15: note = short peptide
TTTAAAVASTGPSSR

SEQ ID NO: 6636 - protein, 11 aa, synthetic construct
  REGION 1..11: note = short peptide
APYGNPKNMAY

SEQ ID NO: 6637 - protein, 9 aa, synthetic construct
  REGION 1..9: note = short peptide
TTSSVKSPS

SEQ ID NO: 6638 - protein, 8 aa, synthetic construct
  REGION 1..8: note = short peptide
KTPATKIR

SEQ ID NO: 6639 - protein, 9 aa, synthetic construct
  REGION 1..9: note = short peptide
TTPPPPPPP

SEQ ID NO: 6640 - protein, 12 aa, synthetic construct
  REGION 1..12: note = short peptide
ARFSGSGSGTDF

SEQ ID NO: 6641 - protein, 8 aa, synthetic construct
  REGION 1..8: note = short peptide
TRKPPAPK

SEQ ID NO: 6642 - protein, 11 aa, synthetic construct
  REGION 1..11: note = short peptide
TSDHFETIMKY

SEQ ID NO: 6643 - protein, 10 aa, synthetic construct
  REGION 1..10: note = short peptide
VAAGGSGRAR

SEQ ID NO: 6644 - protein, 8 aa, synthetic construct
  REGION 1..8: note = short peptide
VAHKQLSA

SEQ ID NO: 6645 - protein, 9 aa, synthetic construct
  REGION 1..9: note = short peptide
APKLLIYDA

SEQ ID NO: 6646 - protein, 9 aa, synthetic construct
  REGION 1..9: note = short peptide
TRNDTKESL

SEQ ID NO: 6647 - protein, 9 aa, synthetic construct
  REGION 1..9: note = short peptide
ASGGIFVLK

SEQ ID NO: 6648 - protein, 8 aa, synthetic construct
  REGION 1..8: note = short peptide
TRKNKEFF

SEQ ID NO: 6649 - protein, 14 aa, synthetic construct
  REGION 1..14: note = short peptide
ASGKQEPEAKEAPA

SEQ ID NO: 6650 - protein, 9 aa, synthetic construct
  REGION 1..9: note = short peptide
VAKMKKMEM

SEQ ID NO: 6651 - protein, 8 aa, synthetic construct
  REGION 1..8: note = short peptide
ASGNARIG

SEQ ID NO: 6652 - protein, 10 aa, synthetic construct
  REGION 1..10: note = short peptide
ASGPAPVSLV

SEQ ID NO: 6653 - protein, 8 aa, synthetic construct
  REGION 1..8: note = short peptide
TQTVRKVR

SEQ ID NO: 6654 - protein, 13 aa, synthetic construct
  REGION 1..13: note = short peptide
ASHIASNPKASAK

SEQ ID NO: 6655 - protein, 12 aa, synthetic construct
  REGION 1..12: note = short peptide
VAMPALAPPEVV

SEQ ID NO: 6656 - protein, 9 aa, synthetic construct
  REGION 1..9: note = short peptide
KSDEMELLY

SEQ ID NO: 6657 - protein, 10 aa, synthetic construct
  REGION 1..10: note = short peptide
TVVQGFPMFK

SEQ ID NO: 6658 - protein, 10 aa, synthetic construct
  REGION 1..10: note = short peptide
KSAPSTGGVK

SEQ ID NO: 6659 - protein, 15 aa, synthetic construct
  REGION 1..15: note = short peptide
KTNESVSEPRKGFMY

SEQ ID NO: 6660 - protein, 12 aa, synthetic construct
  REGION 1..12: note = short peptide
TTAPPPPSPASP

SEQ ID NO: 6661 - protein, 11 aa, synthetic construct
  REGION 1..11: note = short peptide
TSSEQTGSSSF

SEQ ID NO: 6662 - protein, 9 aa, synthetic construct
  REGION 1..9: note = short peptide
ASASIIVKM

SEQ ID NO: 6663 - protein, 9 aa, synthetic construct
  REGION 1..9: note = short peptide
ASCKVPVKK

SEQ ID NO: 6664 - protein, 10 aa, synthetic construct
  REGION 1..10: note = short peptide
ASDFITKMDY

SEQ ID NO: 6665 - protein, 9 aa, synthetic construct
  REGION 1..9: note = short peptide
TSKGDKELR

SEQ ID NO: 6666 - protein, 10 aa, synthetic construct
  REGION 1..10: note = short peptide
APPPGNPAGF

SEQ ID NO: 6667 - protein, 12 aa, synthetic construct
  REGION 1..12: note = short peptide
APNNKGSVSVVK

SEQ ID NO: 6668 - protein, 11 aa, synthetic construct
  REGION 1..11: note = short peptide
TSETPDYLLKY

SEQ ID NO: 6669 - protein, 10 aa, synthetic construct
  REGION 1..10: note = short peptide
TYLVRHRTKE

SEQ ID NO: 6670 - protein, 11 aa, synthetic construct
  REGION 1..11: note = short peptide
TYSDRGSQSFF

SEQ ID NO: 6671 - protein, 9 aa, synthetic construct
  REGION 1..9: note = short peptide
ATYGLNVDR

SEQ ID NO: 6672 - protein, 13 aa, synthetic construct
  REGION 1..13: note = short peptide
VKAQYEDIAQKSK

SEQ ID NO: 6673 - protein, 10 aa, synthetic construct
  REGION 1..10: note = short peptide
TGCGKTFVSL

SEQ ID NO: 6674 - protein, 12 aa, synthetic construct
  REGION 1..12: note = short peptide
VSLNSYSGAGKP

SEQ ID NO: 6675 - protein, 10 aa, synthetic construct
  REGION 1..10: note = short peptide
VSSRKSSSPA

SEQ ID NO: 6676 - protein, 10 aa, synthetic construct
  REGION 1..10: note = short peptide
KTFEGNLTTK

SEQ ID NO: 6677 - protein, 9 aa, synthetic construct
  REGION 1..9: note = short peptide
TEAPLNPKA

SEQ ID NO: 6678 - protein, 11 aa, synthetic construct
  REGION 1..11: note = short peptide
TDWLDGKHVVF

SEQ ID NO: 6679 - protein, 10 aa, synthetic construct
  REGION 1..10: note = short peptide
TDWLDGKHVV

SEQ ID NO: 6680 - protein, 14 aa, synthetic construct
  REGION 1..14: note = short peptide
AEPSAPESKHKSSL

SEQ ID NO: 6681 - protein, 15 aa, synthetic construct
  REGION 1..15: note = short peptide
VTLSQPKIVKWDRDM

SEQ ID NO: 6682 - protein, 14 aa, synthetic construct
  REGION 1..14: note = short peptide
TDLLRSVVTVIDVF

SEQ ID NO: 6683 - protein, 9 aa, synthetic construct
  REGION 1..9: note = short peptide
TDLLRSVVT

SEQ ID NO: 6684 - protein, 11 aa, synthetic construct
  REGION 1..11: note = short peptide
VTNITSSIMQK

SEQ ID NO: 6685 - protein, 11 aa, synthetic construct
  REGION 1..11: note = short peptide
VTNITSSIMQK

SEQ ID NO: 6686 - protein, 9 aa, synthetic construct
  REGION 1..9: note = short peptide
VSKASLIFI

SEQ ID NO: 6687 - protein, 10 aa, synthetic construct
  REGION 1..10: note = short peptide
TGAHADLNPF

SEQ ID NO: 6688 - protein, 8 aa, synthetic construct
  REGION 1..8: note = short peptide
TGAGVKPK

SEQ ID NO: 6689 - protein, 9 aa, synthetic construct
  REGION 1..9: note = short peptide
DANHKLVFI

SEQ ID NO: 6690 - protein, 10 aa, synthetic construct
  REGION 1..10: note = short peptide
DAPGGFRCVC

SEQ ID NO: 6691 - protein, 14 aa, synthetic construct
  REGION 1..14: note = short peptide
AEYSYVKSTKLVLK

SEQ ID NO: 6692 - protein, 9 aa, synthetic construct
  REGION 1..9: note = short peptide
TEVSKTPEA

SEQ ID NO: 6693 - protein, 8 aa, synthetic construct
  REGION 1..8: note = short peptide
KTFRSQAI

SEQ ID NO: 6694 - protein, 15 aa, synthetic construct
  REGION 1..15: note = short peptide
TEKPTLNKTEQAGRN

SEQ ID NO: 6695 - protein, 9 aa, synthetic construct
  REGION 1..9: note = short peptide
DDQLKVHGF

SEQ ID NO: 6696 - protein, 9 aa, synthetic construct
  REGION 1..9: note = short peptide
DDRIYVTNY

SEQ ID NO: 6697 - protein, 9 aa, synthetic construct
  REGION 1..9: note = short peptide
VRYPDRITL

SEQ ID NO: 6698 - protein, 10 aa, synthetic construct
  REGION 1..10: note = short peptide
TELAPQQVPG

SEQ ID NO: 6699 - protein, 10 aa, synthetic construct
  REGION 1..10: note = short peptide
TDKTEKVAVD

SEQ ID NO: 6700 - protein, 9 aa, synthetic construct
  REGION 1..9: note = short peptide
KTEDKVRVM

SEQ ID NO: 6701 - protein, 9 aa, synthetic construct
  REGION 1..9: note = short peptide
TAPSPAPVL

SEQ ID NO: 6702 - protein, 10 aa, synthetic construct
  REGION 1..10: note = short peptide
TALSGRELNV

SEQ ID NO: 6703 - protein, 12 aa, synthetic construct
  REGION 1..12: note = short peptide
DKKTYGEIFEKF

SEQ ID NO: 6704 - protein, 11 aa, synthetic construct
  REGION 1..11: note = short peptide
TAKGPKGALSP

SEQ ID NO: 6705 - protein, 9 aa, synthetic construct
  REGION 1..9: note = short peptide
VYIHHFDRV

SEQ ID NO: 6706 - protein, 13 aa, synthetic construct
  REGION 1..13: note = short peptide
DIVDIKGMGTVQK

SEQ ID NO: 6707 - protein, 13 aa, synthetic construct
  REGION 1..13: note = short peptide
DKLLTDDGNKWLY

SEQ ID NO: 6708 - protein, 9 aa, synthetic construct
  REGION 1..9: note = short peptide
AEITDKLGL

SEQ ID NO: 6709 - protein, 9 aa, synthetic construct
  REGION 1..9: note = short peptide
AEIPGPPGF

SEQ ID NO: 6710 - protein, 8 aa, synthetic construct
  REGION 1..8: note = short peptide
KRVQETNK

SEQ ID NO: 6711 - protein, 9 aa, synthetic construct
  REGION 1..9: note = short peptide
VYVKEPPVF

SEQ ID NO: 6712 - protein, 11 aa, synthetic construct
  REGION 1..11: note = short peptide
AEGDGKMHITL

SEQ ID NO: 6713 - protein, 9 aa, synthetic construct
  REGION 1..9: note = short peptide
VVDYPNSAK

SEQ ID NO: 6714 - protein, 8 aa, synthetic construct
  REGION 1..8: note = short peptide
TDIYKQIR

SEQ ID NO: 6715 - protein, 10 aa, synthetic construct
  REGION 1..10: note = short peptide
TDFTLTINSL

SEQ ID NO: 6716 - protein, 10 aa, synthetic construct
  REGION 1..10: note = short peptide
KRWQAIYKQF

SEQ ID NO: 6717 - protein, 10 aa, synthetic construct
  REGION 1..10: note = short peptide
VVDNGSGMCK

SEQ ID NO: 6718 - protein, 9 aa, synthetic construct
  REGION 1..9: note = short peptide
AEPLLRKTF

SEQ ID NO: 6719 - protein, 10 aa, synthetic construct
  REGION 1..10: note = short peptide
TDANVKNESL

SEQ ID NO: 6720 - protein, 12 aa, synthetic construct
  REGION 1..12: note = short peptide
VVQNIQDICNSK

SEQ ID NO: 6721 - protein, 9 aa, synthetic construct
  REGION 1..9: note = short peptide
KRVQVDVKM

SEQ ID NO: 6722 - protein, 8 aa, synthetic construct
  REGION 1..8: note = short peptide
DHPNVLKF

SEQ ID NO: 6723 - protein, 8 aa, synthetic construct
  REGION 1..8: note = short peptide
TATKGLIR

SEQ ID NO: 6724 - protein, 9 aa, synthetic construct
  REGION 1..9: note = short peptide
DHQLSVAEL

SEQ ID NO: 6725 - protein, 9 aa, synthetic construct
  REGION 1..9: note = short peptide
DAMDSELAY

SEQ ID NO: 6726 - protein, 15 aa, synthetic construct
  REGION 1..15: note = short peptide
AFKKKFACNGTVIEH

SEQ ID NO: 6727 - protein, 10 aa, synthetic construct
  REGION 1..10: note = short peptide
TKAGHGAGKP

SEQ ID NO: 6728 - protein, 9 aa, synthetic construct
  REGION 1..9: note = short peptide
TIRTKVFVW

SEQ ID NO: 6729 - protein, 11 aa, synthetic construct
  REGION 1..11: note = short peptide
AYHSFLVEPIS

SEQ ID NO: 6730 - protein, 9 aa, synthetic construct
  REGION 1..9: note = short peptide
TINKTQLSY

SEQ ID NO: 6731 - protein, 11 aa, synthetic construct
  REGION 1..11: note = short peptide
TIDSSLKSKSL

SEQ ID NO: 6732 - protein, 9 aa, synthetic construct
  REGION 1..9: note = short peptide
TICKEANVY

SEQ ID NO: 6733 - protein, 10 aa, synthetic construct
  REGION 1..10: note = short peptide
CCPRLKILRL

SEQ ID NO: 6734 - protein, 10 aa, synthetic construct
  REGION 1..10: note = short peptide
CCTNETILRY

SEQ ID NO: 6735 - protein, 10 aa, synthetic construct
  REGION 1..10: note = short peptide
THSEKTNRTL

SEQ ID NO: 6736 - protein, 11 aa, synthetic construct
  REGION 1..11: note = short peptide
AIMDPLPLRTK

SEQ ID NO: 6737 - protein, 10 aa, synthetic construct
  REGION 1..10: note = short peptide
CCVVEKPQPK

SEQ ID NO: 6738 - protein, 10 aa, synthetic construct
  REGION 1..10: note = short peptide
AHSNYRAGMI

SEQ ID NO: 6739 - protein, 14 aa, synthetic construct
  REGION 1..14: note = short peptide
TKDTVCSGVTSAVN

SEQ ID NO: 6740 - protein, 11 aa, synthetic construct
  REGION 1..11: note = short peptide
ALALPPGALAK

SEQ ID NO: 6741 - protein, 11 aa, synthetic construct
  REGION 1..11: note = short peptide
TLAALGASKLL

SEQ ID NO: 6742 - protein, 10 aa, synthetic construct
  REGION 1..10: note = short peptide
ALNAGSYASL

SEQ ID NO: 6743 - protein, 12 aa, synthetic construct
  REGION 1..12: note = short peptide
AVDWWSLGALMY

SEQ ID NO: 6744 - protein, 12 aa, synthetic construct
  REGION 1..12: note = short peptide
ALMNGSESRFFV

SEQ ID NO: 6745 - protein, 9 aa, synthetic construct
  REGION 1..9: note = short peptide
AVFNAVNWI

SEQ ID NO: 6746 - protein, 11 aa, synthetic construct
  REGION 1..11: note = short peptide
KTITGKTFSSR

SEQ ID NO: 6747 - protein, 10 aa, synthetic construct
  REGION 1..10: note = short peptide
TLALGGQAPI

SEQ ID NO: 6748 - protein, 11 aa, synthetic construct
  REGION 1..11: note = short peptide
AVIENPEMLKY

SEQ ID NO: 6749 - protein, 9 aa, synthetic construct
  REGION 1..9: note = short peptide
AVKKIAIFG

SEQ ID NO: 6750 - protein, 10 aa, synthetic construct
  REGION 1..10: note = short peptide
ALDGGNKHFL

SEQ ID NO: 6751 - protein, 12 aa, synthetic construct
  REGION 1..12: note = short peptide
ALATAEQACKEK

SEQ ID NO: 6752 - protein, 9 aa, synthetic construct
  REGION 1..9: note = short peptide
VLIPKLPQL

SEQ ID NO: 6753 - protein, 9 aa, synthetic construct
  REGION 1..9: note = short peptide
ALANGSAPR

SEQ ID NO: 6754 - protein, 9 aa, synthetic construct
  REGION 1..9: note = short peptide
THNPMIQKT

SEQ ID NO: 6755 - protein, 8 aa, synthetic construct
  REGION 1..8: note = short peptide
THLTVVSF

SEQ ID NO: 6756 - protein, 13 aa, synthetic construct
  REGION 1..13: note = short peptide
TGGQKVNGASVVM

SEQ ID NO: 6757 - protein, 11 aa, synthetic construct
  REGION 1..11: note = short peptide
TGLPTLEPAPV

SEQ ID NO: 6758 - protein, 9 aa, synthetic construct
  REGION 1..9: note = short peptide
TGKPYVPLL

SEQ ID NO: 6759 - protein, 9 aa, synthetic construct
  REGION 1..9: note = short peptide
TGINAINQK

SEQ ID NO: 6760 - protein, 9 aa, synthetic construct
  REGION 1..9: note = short peptide
TGGRIVEGL

SEQ ID NO: 6761 - protein, 13 aa, synthetic construct
  REGION 1..13: note = short peptide
AGKQAVSASGKWL

SEQ ID NO: 6762 - protein, 9 aa, synthetic construct
  REGION 1..9: note = short peptide
TGGNFKPSQ

SEQ ID NO: 6763 - protein, 9 aa, synthetic construct
  REGION 1..9: note = short peptide
VPRNQNESV

SEQ ID NO: 6764 - protein, 14 aa, synthetic construct
  REGION 1..14: note = short peptide
AGAGSEARFAGLSL

SEQ ID NO: 6765 - protein, 9 aa, synthetic construct
  REGION 1..9: note = short peptide
AFNTTVAAL

SEQ ID NO: 6766 - protein, 8 aa, synthetic construct
  REGION 1..8: note = short peptide
DAGPGADI

SEQ ID NO: 6767 - protein, 9 aa, synthetic construct
  REGION 1..9: note = short peptide
TGLPVSTLN

SEQ ID NO: 6768 - protein, 14 aa, synthetic construct
  REGION 1..14: note = short peptide
AGLNSLEAVKRKIQ

SEQ ID NO: 6769 - protein, 9 aa, synthetic construct
  REGION 1..9: note = short peptide
THDLKNIRF

SEQ ID NO: 6770 - protein, 10 aa, synthetic construct
  REGION 1..10: note = short peptide
CGCGGAPARA

SEQ ID NO: 6771 - protein, 9 aa, synthetic construct
  REGION 1..9: note = short peptide
VNLTRLHTL

SEQ ID NO: 6772 - protein, 10 aa, synthetic construct
  REGION 1..10: note = short peptide
THIDTVINAL

SEQ ID NO: 6773 - protein, 12 aa, synthetic construct
  REGION 1..12: note = short peptide
THHPISDHEATL

SEQ ID NO: 6774 - protein, 9 aa, synthetic construct
  REGION 1..9: note = short peptide
VPAQLKELV

SEQ ID NO: 6775 - protein, 13 aa, synthetic construct
  REGION 1..13: note = short peptide
TGPPGSEASGPPA

SEQ ID NO: 6776 - protein, 9 aa, synthetic construct
  REGION 1..9: note = short peptide
THAPGTTAA

SEQ ID NO: 6777 - protein, 12 aa, synthetic construct
  REGION 1..12: note = short peptide
TGYLKGYTLVEY

SEQ ID NO: 6778 - protein, 11 aa, synthetic construct
  REGION 1..11: note = short peptide
VPHPNWPNHTL

SEQ ID NO: 6779 - protein, 11 aa, synthetic construct
  REGION 1..11: note = short peptide
TGSTDATIRAW

SEQ ID NO: 6780 - protein, 11 aa, synthetic construct
  REGION 1..11: note = short peptide
VPHPNWPNHTL

SEQ ID NO: 6781 - protein, 11 aa, synthetic construct
  REGION 1..11: note = short peptide
TGSSNITVYRL

SEQ ID NO: 6782 - protein, 13 aa, synthetic construct
  REGION 1..13: note = short peptide
KNRHCLLDIAPHA

SEQ ID NO: 6783 - protein, 9 aa, synthetic construct
  REGION 1..9: note = short peptide
NSEITSLYY

SEQ ID NO: 6784 - protein, 8 aa, synthetic construct
  REGION 1..8: note = short peptide
KAKVNRAF

SEQ ID NO: 6785 - protein, 14 aa, synthetic construct
  REGION 1..14: note = short peptide
NSQKDILEEKRAVP

SEQ ID NO: 6786 - protein, 15 aa, synthetic construct
  REGION 1..15: note = short peptide
NSQMKMAGAMSTTAK

SEQ ID NO: 6787 - protein, 9 aa, synthetic construct
  REGION 1..9: note = short peptide
KAGVKINPK

SEQ ID NO: 6788 - protein, 9 aa, synthetic construct
  REGION 1..9: note = short peptide
KAGLTIVTP

SEQ ID NO: 6789 - protein, 9 aa, synthetic construct
  REGION 1..9: note = short peptide
KAFRSGKLL

SEQ ID NO: 6790 - protein, 13 aa, synthetic construct
  REGION 1..13: note = short peptide
NTRLNRGEYVDVP

SEQ ID NO: 6791 - protein, 8 aa, synthetic construct
  REGION 1..8: note = short peptide
KACLPPSL

SEQ ID NO: 6792 - protein, 9 aa, synthetic construct
  REGION 1..9: note = short peptide
NSGLILHQR

SEQ ID NO: 6793 - protein, 9 aa, synthetic construct
  REGION 1..9: note = short peptide
KARASQVKP

SEQ ID NO: 6794 - protein, 10 aa, synthetic construct
  REGION 1..10: note = short peptide
KAQQDKATLK

SEQ ID NO: 6795 - protein, 11 aa, synthetic construct
  REGION 1..11: note = short peptide
KAPPPALGLGI

SEQ ID NO: 6796 - protein, 9 aa, synthetic construct
  REGION 1..9: note = short peptide
KAPKVVILK

SEQ ID NO: 6797 - protein, 8 aa, synthetic construct
  REGION 1..8: note = short peptide
NRAPQLLI

SEQ ID NO: 6798 - protein, 9 aa, synthetic construct
  REGION 1..9: note = short peptide
KAANIPLVS

SEQ ID NO: 6799 - protein, 13 aa, synthetic construct
  REGION 1..13: note = short peptide
KAAKSAAKAVKPK

SEQ ID NO: 6800 - protein, 12 aa, synthetic construct
  REGION 1..12: note = short peptide
KAAKPKAAKAKK

SEQ ID NO: 6801 - protein, 10 aa, synthetic construct
  REGION 1..10: note = short peptide
ITFDKLTFIP

SEQ ID NO: 6802 - protein, 10 aa, synthetic construct
  REGION 1..10: note = short peptide
ISVPTTLPAP

SEQ ID NO: 6803 - protein, 10 aa, synthetic construct
  REGION 1..10: note = short peptide
PEGNFKISKF

SEQ ID NO: 6804 - protein, 10 aa, synthetic construct
  REGION 1..10: note = short peptide
ISSHATSHPV

SEQ ID NO: 6805 - protein, 11 aa, synthetic construct
  REGION 1..11: note = short peptide
ISMPDVDLNLK

SEQ ID NO: 6806 - protein, 10 aa, synthetic construct
  REGION 1..10: note = short peptide
PFNPLLGETF

SEQ ID NO: 6807 - protein, 14 aa, synthetic construct
  REGION 1..14: note = short peptide
ITHGFGTPAICAAL

SEQ ID NO: 6808 - protein, 10 aa, synthetic construct
  REGION 1..10: note = short peptide
ITLMLNPLIY

SEQ ID NO: 6809 - protein, 10 aa, synthetic construct
  REGION 1..10: note = short peptide
ITNKSKPNLP

SEQ ID NO: 6810 - protein, 10 aa, synthetic construct
  REGION 1..10: note = short peptide
IYIDASCLTW

SEQ ID NO: 6811 - protein, 11 aa, synthetic construct
  REGION 1..11: note = short peptide
NVYLIKGKTLR

SEQ ID NO: 6812 - protein, 11 aa, synthetic construct
  REGION 1..11: note = short peptide
LEINFGDLGRP

SEQ ID NO: 6813 - protein, 11 aa, synthetic construct
  REGION 1..11: note = short peptide
IYLNRTLLTTI

SEQ ID NO: 6814 - protein, 9 aa, synthetic construct
  REGION 1..9: note = short peptide
NYVADLGAM

SEQ ID NO: 6815 - protein, 11 aa, synthetic construct
  REGION 1..11: note = short peptide
NYYPQNITMKW

SEQ ID NO: 6816 - protein, 10 aa, synthetic construct
  REGION 1..10: note = short peptide
PAAQVILNKY

SEQ ID NO: 6817 - protein, 9 aa, synthetic construct
  REGION 1..9: note = short peptide
PAFDPNPSL

SEQ ID NO: 6818 - protein, 9 aa, synthetic construct
  REGION 1..9: note = short peptide
IYADLSLKY

SEQ ID NO: 6819 - protein, 10 aa, synthetic construct
  REGION 1..10: note = short peptide
IVMTQSPLSL

SEQ ID NO: 6820 - protein, 15 aa, synthetic construct
  REGION 1..15: note = short peptide
IVGGHEAQPHSRPYM

SEQ ID NO: 6821 - protein, 11 aa, synthetic construct
  REGION 1..11: note = short peptide
NPFPRGAGSSA

SEQ ID NO: 6822 - protein, 8 aa, synthetic construct
  REGION 1..8: note = short peptide
NALIARSL

SEQ ID NO: 6823 - protein, 12 aa, synthetic construct
  REGION 1..12: note = short peptide
MSAGANISTWVY

SEQ ID NO: 6824 - protein, 14 aa, synthetic construct
  REGION 1..14: note = short peptide
KEFTPPVQAAYQKV

SEQ ID NO: 6825 - protein, 9 aa, synthetic construct
  REGION 1..9: note = short peptide
MSEDKPQDY

SEQ ID NO: 6826 - protein, 11 aa, synthetic construct
  REGION 1..11: note = short peptide
MSKDRANMQHR

SEQ ID NO: 6827 - protein, 14 aa, synthetic construct
  REGION 1..14: note = short peptide
KEDLTRLLRDYQEL

SEQ ID NO: 6828 - protein, 15 aa, synthetic construct
  REGION 1..15: note = short peptide
KEDALDFKKDKGAFY

SEQ ID NO: 6829 - protein, 9 aa, synthetic construct
  REGION 1..9: note = short peptide
KECDKAFIY

SEQ ID NO: 6830 - protein, 9 aa, synthetic construct
  REGION 1..9: note = short peptide
MVTEIRLKY

SEQ ID NO: 6831 - protein, 11 aa, synthetic construct
  REGION 1..11: note = short peptide
KEALCGCTVNI

SEQ ID NO: 6832 - protein, 9 aa, synthetic construct
  REGION 1..9: note = short peptide
NADPQAVTM

SEQ ID NO: 6833 - protein, 11 aa, synthetic construct
  REGION 1..11: note = short peptide
KEAKGIIQQQK

SEQ ID NO: 6834 - protein, 14 aa, synthetic construct
  REGION 1..14: note = short peptide
MRQKAVSLFLCYLL

SEQ ID NO: 6835 - protein, 14 aa, synthetic construct
  REGION 1..14: note = short peptide
KERNVEDLSGGELQ

SEQ ID NO: 6836 - protein, 9 aa, synthetic construct
  REGION 1..9: note = short peptide
KEPRGALLV

SEQ ID NO: 6837 - protein, 9 aa, synthetic construct
  REGION 1..9: note = short peptide
KEPNPMVQL

SEQ ID NO: 6838 - protein, 9 aa, synthetic construct
  REGION 1..9: note = short peptide
KEKTPVPVP

SEQ ID NO: 6839 - protein, 10 aa, synthetic construct
  REGION 1..10: note = short peptide
KEIKDVKEMF

SEQ ID NO: 6840 - protein, 9 aa, synthetic construct
  REGION 1..9: note = short peptide
MPYQEIKNV

SEQ ID NO: 6841 - protein, 10 aa, synthetic construct
  REGION 1..10: note = short peptide
MPYQEIKNVI

SEQ ID NO: 6842 - protein, 10 aa, synthetic construct
  REGION 1..10: note = short peptide
MPYSTELIFY

SEQ ID NO: 6843 - protein, 8 aa, synthetic construct
  REGION 1..8: note = short peptide
NALKNLQV

SEQ ID NO: 6844 - protein, 12 aa, synthetic construct
  REGION 1..12: note = short peptide
NNGSAMVRVISV

SEQ ID NO: 6845 - protein, 11 aa, synthetic construct
  REGION 1..11: note = short peptide
NHITNTSLNLF

SEQ ID NO: 6846 - protein, 12 aa, synthetic construct
  REGION 1..12: note = short peptide
KDEDIARLLQEK

SEQ ID NO: 6847 - protein, 8 aa, synthetic construct
  REGION 1..8: note = short peptide
KDDQVKKI

SEQ ID NO: 6848 - protein, 10 aa, synthetic construct
  REGION 1..10: note = short peptide
KCPLILTSAL

SEQ ID NO: 6849 - protein, 11 aa, synthetic construct
  REGION 1..11: note = short peptide
KCPKCDKTVYF

SEQ ID NO: 6850 - protein, 15 aa, synthetic construct
  REGION 1..15: note = short peptide
KCIAAKKIKQSVGNK

SEQ ID NO: 6851 - protein, 8 aa, synthetic construct
  REGION 1..8: note = short peptide
KCHKKMGF

SEQ ID NO: 6852 - protein, 9 aa, synthetic construct
  REGION 1..9: note = short peptide
KCEAAKEAL

SEQ ID NO: 6853 - protein, 9 aa, synthetic construct
  REGION 1..9: note = short peptide
NLKNSKVSV

SEQ ID NO: 6854 - protein, 12 aa, synthetic construct
  REGION 1..12: note = short peptide
KCAACQKHFCVG

SEQ ID NO: 6855 - protein, 9 aa, synthetic construct
  REGION 1..9: note = short peptide
KAVKAPGAK

SEQ ID NO: 6856 - protein, 10 aa, synthetic construct
  REGION 1..10: note = short peptide
KAVHNTAVLF

SEQ ID NO: 6857 - protein, 12 aa, synthetic construct
  REGION 1..12: note = short peptide
NHDPNTHHCLCG

SEQ ID NO: 6858 - protein, 9 aa, synthetic construct
  REGION 1..9: note = short peptide
NAPWAVTSL

SEQ ID NO: 6859 - protein, 15 aa, synthetic construct
  REGION 1..15: note = short peptide
NCKLLEILCLLLNEQ

SEQ ID NO: 6860 - protein, 15 aa, synthetic construct
  REGION 1..15: note = short peptide
NCSKENFLFLTPDCK

SEQ ID NO: 6861 - protein, 11 aa, synthetic construct
  REGION 1..11: note = short peptide
LFGGRGEYTAK

SEQ ID NO: 6862 - protein, 11 aa, synthetic construct
  REGION 1..11: note = short peptide
NEFKEKGIGTL

SEQ ID NO: 6863 - protein, 10 aa, synthetic construct
  REGION 1..10: note = short peptide
NEFRASFNHF

SEQ ID NO: 6864 - protein, 14 aa, synthetic construct
  REGION 1..14: note = short peptide
KDKVDVASVIVTKL

SEQ ID NO: 6865 - protein, 10 aa, synthetic construct
  REGION 1..10: note = short peptide
LETALNAKAY

SEQ ID NO: 6866 - protein, 10 aa, synthetic construct
  REGION 1..10: note = short peptide
NGGGWTPLMY

SEQ ID NO: 6867 - protein, 8 aa, synthetic construct
  REGION 1..8: note = short peptide
NHAAVFRV

SEQ ID NO: 6868 - protein, 11 aa, synthetic construct
  REGION 1..11: note = short peptide
KDGLEETTSHL

SEQ ID NO: 6869 - protein, 13 aa, synthetic construct
  REGION 1..13: note = short peptide
LDSKFLEQVHQLY

SEQ ID NO: 6870 - protein, 14 aa, synthetic construct
  REGION 1..14: note = short peptide
QSSGSVGSSGISSI

SEQ ID NO: 6871 - protein, 11 aa, synthetic construct
  REGION 1..11: note = short peptide
HTQGPVDGSLY

SEQ ID NO: 6872 - protein, 8 aa, synthetic construct
  REGION 1..8: note = short peptide
QQHRGAAW

SEQ ID NO: 6873 - protein, 11 aa, synthetic construct
  REGION 1..11: note = short peptide
HTNGTGHGNLR

SEQ ID NO: 6874 - protein, 15 aa, synthetic construct
  REGION 1..15: note = short peptide
QRENSAAVQKAIAHY

SEQ ID NO: 6875 - protein, 8 aa, synthetic construct
  REGION 1..8: note = short peptide
QRHTEFTL

SEQ ID NO: 6876 - protein, 9 aa, synthetic construct
  REGION 1..9: note = short peptide
QRLLQRPRP

SEQ ID NO: 6877 - protein, 9 aa, synthetic construct
  REGION 1..9: note = short peptide
QSAPATVRM

SEQ ID NO: 6878 - protein, 15 aa, synthetic construct
  REGION 1..15: note = short peptide
QSKDSPYYQGFESYY

SEQ ID NO: 6879 - protein, 10 aa, synthetic construct
  REGION 1..10: note = short peptide
HTDVLKDGFV

SEQ ID NO: 6880 - protein, 9 aa, synthetic construct
  REGION 1..9: note = short peptide
HVIEKMHHV

SEQ ID NO: 6881 - protein, 8 aa, synthetic construct
  REGION 1..8: note = short peptide
HVNAAGLK

SEQ ID NO: 6882 - protein, 10 aa, synthetic construct
  REGION 1..10: note = short peptide
KPISPQQKSA

SEQ ID NO: 6883 - protein, 8 aa, synthetic construct
  REGION 1..8: note = short peptide
ICRIHETI

SEQ ID NO: 6884 - protein, 9 aa, synthetic construct
  REGION 1..9: note = short peptide
IASPGTVHK

SEQ ID NO: 6885 - protein, 8 aa, synthetic construct
  REGION 1..8: note = short peptide
IANNPHLL

SEQ ID NO: 6886 - protein, 10 aa, synthetic construct
  REGION 1..10: note = short peptide
QLENRILNQT

SEQ ID NO: 6887 - protein, 11 aa, synthetic construct
  REGION 1..11: note = short peptide
HVPEVEVQVKR

SEQ ID NO: 6888 - protein, 9 aa, synthetic construct
  REGION 1..9: note = short peptide
QMDKPTEVN

SEQ ID NO: 6889 - protein, 8 aa, synthetic construct
  REGION 1..8: note = short peptide
HWKSQHPF

SEQ ID NO: 6890 - protein, 13 aa, synthetic construct
  REGION 1..13: note = short peptide
QPPATLQAREHPV

SEQ ID NO: 6891 - protein, 9 aa, synthetic construct
  REGION 1..9: note = short peptide
QSNSTAKEL

SEQ ID NO: 6892 - protein, 9 aa, synthetic construct
  REGION 1..9: note = short peptide
HSSNLTAAH

SEQ ID NO: 6893 - protein, 15 aa, synthetic construct
  REGION 1..15: note = short peptide
HSQPFKQEWLNKHSM

SEQ ID NO: 6894 - protein, 9 aa, synthetic construct
  REGION 1..9: note = short peptide
LALPELYKS

SEQ ID NO: 6895 - protein, 11 aa, synthetic construct
  REGION 1..11: note = short peptide
RAVAFAAASRG

SEQ ID NO: 6896 - protein, 10 aa, synthetic construct
  REGION 1..10: note = short peptide
RAVGRGLQPK

SEQ ID NO: 6897 - protein, 11 aa, synthetic construct
  REGION 1..11: note = short peptide
LALLMSNGSTK

SEQ ID NO: 6898 - protein, 9 aa, synthetic construct
  REGION 1..9: note = short peptide
RAYPHVFTK

SEQ ID NO: 6899 - protein, 8 aa, synthetic construct
  REGION 1..8: note = short peptide
RCFLSWLV

SEQ ID NO: 6900 - protein, 9 aa, synthetic construct
  REGION 1..9: note = short peptide
HQEIARSSY

SEQ ID NO: 6901 - protein, 9 aa, synthetic construct
  REGION 1..9: note = short peptide
HPYQPDPKM

SEQ ID NO: 6902 - protein, 8 aa, synthetic construct
  REGION 1..8: note = short peptide
RDIEVQKM

SEQ ID NO: 6903 - protein, 12 aa, synthetic construct
  REGION 1..12: note = short peptide
RDITFPPGSVEA

SEQ ID NO: 6904 - protein, 9 aa, synthetic construct
  REGION 1..9: note = short peptide
QVINETSQH

SEQ ID NO: 6905 - protein, 9 aa, synthetic construct
  REGION 1..9: note = short peptide
QTDHLFFKY

SEQ ID NO: 6906 - protein, 14 aa, synthetic construct
  REGION 1..14: note = short peptide
QTLTIVDTGIGMTK

SEQ ID NO: 6907 - protein, 8 aa, synthetic construct
  REGION 1..8: note = short peptide
QVFNQIVK

SEQ ID NO: 6908 - protein, 9 aa, synthetic construct
  REGION 1..9: note = short peptide
HSDPSILGY

SEQ ID NO: 6909 - protein, 15 aa, synthetic construct
  REGION 1..15: note = short peptide
QVSLKVSNDGPTLIG

SEQ ID NO: 6910 - protein, 10 aa, synthetic construct
  REGION 1..10: note = short peptide
HSAPLTPVAR

SEQ ID NO: 6911 - protein, 9 aa, synthetic construct
  REGION 1..9: note = short peptide
RAFPLPMSF

SEQ ID NO: 6912 - protein, 15 aa, synthetic construct
  REGION 1..15: note = short peptide
IDKRTIEKFEKEAAE

SEQ ID NO: 6913 - protein, 8 aa, synthetic construct
  REGION 1..8: note = short peptide
PGPQGQFR

SEQ ID NO: 6914 - protein, 10 aa, synthetic construct
  REGION 1..10: note = short peptide
IPMRDFVCAC

SEQ ID NO: 6915 - protein, 8 aa, synthetic construct
  REGION 1..8: note = short peptide
IPLPPPLP

SEQ ID NO: 6916 - protein, 12 aa, synthetic construct
  REGION 1..12: note = short peptide
LDKLFDHAVSKF

SEQ ID NO: 6917 - protein, 12 aa, synthetic construct
  REGION 1..12: note = short peptide
PQTQPQQPQPPQ

SEQ ID NO: 6918 - protein, 9 aa, synthetic construct
  REGION 1..9: note = short peptide
PRINSALHV

SEQ ID NO: 6919 - protein, 9 aa, synthetic construct
  REGION 1..9: note = short peptide
IPDGGVHIV

SEQ ID NO: 6920 - protein, 9 aa, synthetic construct
  REGION 1..9: note = short peptide
PRTPGPPGL

SEQ ID NO: 6921 - protein, 11 aa, synthetic construct
  REGION 1..11: note = short peptide
PSDVSPSPDAP

SEQ ID NO: 6922 - protein, 13 aa, synthetic construct
  REGION 1..13: note = short peptide
PPMEAAGFTAQVI

SEQ ID NO: 6923 - protein, 9 aa, synthetic construct
  REGION 1..9: note = short peptide
IPVDLKRRL

SEQ ID NO: 6924 - protein, 15 aa, synthetic construct
  REGION 1..15: note = short peptide
IRAAKEAKKAKQASK

SEQ ID NO: 6925 - protein, 12 aa, synthetic construct
  REGION 1..12: note = short peptide
LDRLAYIAHPKL

SEQ ID NO: 6926 - protein, 9 aa, synthetic construct
  REGION 1..9: note = short peptide
PLDFFQPPP

SEQ ID NO: 6927 - protein, 13 aa, synthetic construct
  REGION 1..13: note = short peptide
IPVGLLGKDICAC

SEQ ID NO: 6928 - protein, 10 aa, synthetic construct
  REGION 1..10: note = short peptide
PLGFLKVPIW

SEQ ID NO: 6929 - protein, 12 aa, synthetic construct
  REGION 1..12: note = short peptide
PLSDHEALMATL

SEQ ID NO: 6930 - protein, 13 aa, synthetic construct
  REGION 1..13: note = short peptide
PLVRLGLTETLGK

SEQ ID NO: 6931 - protein, 9 aa, synthetic construct
  REGION 1..9: note = short peptide
INRSFLSFK

SEQ ID NO: 6932 - protein, 8 aa, synthetic construct
  REGION 1..8: note = short peptide
QAAPGRPR

SEQ ID NO: 6933 - protein, 8 aa, synthetic construct
  REGION 1..8: note = short peptide
IGGVKIYF

SEQ ID NO: 6934 - protein, 9 aa, synthetic construct
  REGION 1..9: note = short peptide
QAPAKAQPA

SEQ ID NO: 6935 - protein, 14 aa, synthetic construct
  REGION 1..14: note = short peptide
QDKTLSLPELEQQQ

SEQ ID NO: 6936 - protein, 14 aa, synthetic construct
  REGION 1..14: note = short peptide
QEQLVEAGRLVAKA

SEQ ID NO: 6937 - protein, 8 aa, synthetic construct
  REGION 1..8: note = short peptide
QEVKERAI

SEQ ID NO: 6938 - protein, 15 aa, synthetic construct
  REGION 1..15: note = short peptide
IFDYDYDGLHDTEDK

SEQ ID NO: 6939 - protein, 15 aa, synthetic construct
  REGION 1..15: note = short peptide
QGPKGGSGSGPTIEE

SEQ ID NO: 6940 - protein, 8 aa, synthetic construct
  REGION 1..8: note = short peptide
QGSRVTSH

SEQ ID NO: 6941 - protein, 8 aa, synthetic construct
  REGION 1..8: note = short peptide
IGRKVSSL

SEQ ID NO: 6942 - protein, 9 aa, synthetic construct
  REGION 1..9: note = short peptide
LDDRILQCI

SEQ ID NO: 6943 - protein, 9 aa, synthetic construct
  REGION 1..9: note = short peptide
ILVDLGRTF

SEQ ID NO: 6944 - protein, 11 aa, synthetic construct
  REGION 1..11: note = short peptide
PTIPQANPPPV

SEQ ID NO: 6945 - protein, 9 aa, synthetic construct
  REGION 1..9: note = short peptide
ILFNLTHRV

SEQ ID NO: 6946 - protein, 15 aa, synthetic construct
  REGION 1..15: note = short peptide
IKEVKEAKAKAKKES

SEQ ID NO: 6947 - protein, 10 aa, synthetic construct
  REGION 1..10: note = short peptide
PVPVKETRPY

SEQ ID NO: 6948 - protein, 9 aa, synthetic construct
  REGION 1..9: note = short peptide
IIAPPERKY

SEQ ID NO: 6949 - protein, 9 aa, synthetic construct
  REGION 1..9: note = short peptide
PVSTNAVQR

SEQ ID NO: 6950 - protein, 9 aa, synthetic construct
  REGION 1..9: note = short peptide
PVSTNAVQR

SEQ ID NO: 6951 - protein, 14 aa, synthetic construct
  REGION 1..14: note = short peptide
IIKFPLTTESAMKK

SEQ ID NO: 6952 - protein, 10 aa, synthetic construct
  REGION 1..10: note = short peptide
LFTAESLIGL

SEQ ID NO: 6953 - protein, 9 aa, synthetic construct
  REGION 1..9: note = short peptide
EGGLLEDHF

SEQ ID NO: 6954 - protein, 10 aa, synthetic construct
  REGION 1..10: note = short peptide
LLDQGQLNKY

SEQ ID NO: 6955 - protein, 9 aa, synthetic construct
  REGION 1..9: note = short peptide
KLKSFSAKI

SEQ ID NO: 6956 - protein, 9 aa, synthetic construct
  REGION 1..9: note = short peptide
KLKMRLEAL

SEQ ID NO: 6957 - protein, 9 aa, synthetic construct
  REGION 1..9: note = short peptide
KLKITAVDK

SEQ ID NO: 6958 - protein, 10 aa, synthetic construct
  REGION 1..10: note = short peptide
MAVSQPNLVM

SEQ ID NO: 6959 - protein, 9 aa, synthetic construct
  REGION 1..9: note = short peptide
MDAIKKKMQ

SEQ ID NO: 6960 - protein, 12 aa, synthetic construct
  REGION 1..12: note = short peptide
KLILQNHILKVK

SEQ ID NO: 6961 - protein, 8 aa, synthetic construct
  REGION 1..8: note = short peptide
KLICVKAL

SEQ ID NO: 6962 - protein, 12 aa, synthetic construct
  REGION 1..12: note = short peptide
LVTYVPVTTFKN

SEQ ID NO: 6963 - protein, 11 aa, synthetic construct
  REGION 1..11: note = short peptide
KLLNGSAGDTW

SEQ ID NO: 6964 - protein, 8 aa, synthetic construct
  REGION 1..8: note = short peptide
KEVKKPTL

SEQ ID NO: 6965 - protein, 14 aa, synthetic construct
  REGION 1..14: note = short peptide
LTEEQAGPGEPAAP

SEQ ID NO: 6966 - protein, 11 aa, synthetic construct
  REGION 1..11: note = short peptide
KLPGKGKSTMK

SEQ ID NO: 6967 - protein, 10 aa, synthetic construct
  REGION 1..10: note = short peptide
KLPEKEHGKI

SEQ ID NO: 6968 - protein, 8 aa, synthetic construct
  REGION 1..8: note = short peptide
KLNQLWEK

SEQ ID NO: 6969 - protein, 15 aa, synthetic construct
  REGION 1..15: note = short peptide
LTIAEERDKRLAAKQ

SEQ ID NO: 6970 - protein, 15 aa, synthetic construct
  REGION 1..15: note = short peptide
LLEETWGKPSWGPNI

SEQ ID NO: 6971 - protein, 9 aa, synthetic construct
  REGION 1..9: note = short peptide
LTRKPMTTK

SEQ ID NO: 6972 - protein, 13 aa, synthetic construct
  REGION 1..13: note = short peptide
KLMKEILDKKVEK

SEQ ID NO: 6973 - protein, 9 aa, synthetic construct
  REGION 1..9: note = short peptide
LTTHQKPSI

SEQ ID NO: 6974 - protein, 15 aa, synthetic construct
  REGION 1..15: note = short peptide
LTVTDLLGKCLLSPV

SEQ ID NO: 6975 - protein, 11 aa, synthetic construct
  REGION 1..11: note = short peptide
LVAEPVQNGSR

SEQ ID NO: 6976 - protein, 14 aa, synthetic construct
  REGION 1..14: note = short peptide
LVAQALKADLVPYL

SEQ ID NO: 6977 - protein, 8 aa, synthetic construct
  REGION 1..8: note = short peptide
KLHKLLSY

SEQ ID NO: 6978 - protein, 11 aa, synthetic construct
  REGION 1..11: note = short peptide
KLAPAMKTQKL

SEQ ID NO: 6979 - protein, 14 aa, synthetic construct
  REGION 1..14: note = short peptide
MKHATKTAKDALSS

SEQ ID NO: 6980 - protein, 15 aa, synthetic construct
  REGION 1..15: note = short peptide
MKHATKTAKDALSSV

SEQ ID NO: 6981 - protein, 15 aa, synthetic construct
  REGION 1..15: note = short peptide
KKTKKSLESINSRLQ

SEQ ID NO: 6982 - protein, 15 aa, synthetic construct
  REGION 1..15: note = short peptide
MKLNISFPATGCQKL

SEQ ID NO: 6983 - protein, 10 aa, synthetic construct
  REGION 1..10: note = short peptide
KKRSKKIQKK

SEQ ID NO: 6984 - protein, 8 aa, synthetic construct
  REGION 1..8: note = short peptide
KKRDERPL

SEQ ID NO: 6985 - protein, 10 aa, synthetic construct
  REGION 1..10: note = short peptide
KLASYQAARK

SEQ ID NO: 6986 - protein, 9 aa, synthetic construct
  REGION 1..9: note = short peptide
KPAENDVKL

SEQ ID NO: 6987 - protein, 8 aa, synthetic construct
  REGION 1..8: note = short peptide
KLGHQDKL

SEQ ID NO: 6988 - protein, 10 aa, synthetic construct
  REGION 1..10: note = short peptide
KLFDHAVSKF

SEQ ID NO: 6989 - protein, 15 aa, synthetic construct
  REGION 1..15: note = short peptide
LLCKCDQEIANCLAQ

SEQ ID NO: 6990 - protein, 12 aa, synthetic construct
  REGION 1..12: note = short peptide
MEGCSSPIVVKF

SEQ ID NO: 6991 - protein, 12 aa, synthetic construct
  REGION 1..12: note = short peptide
KLPGKGKSTMKK

SEQ ID NO: 6992 - protein, 10 aa, synthetic construct
  REGION 1..10: note = short peptide
KLPSGVSAKL

SEQ ID NO: 6993 - protein, 10 aa, synthetic construct
  REGION 1..10: note = short peptide
KMMADYGIRK

SEQ ID NO: 6994 - protein, 13 aa, synthetic construct
  REGION 1..13: note = short peptide
LPRAQEGLRPGTL

SEQ ID NO: 6995 - protein, 10 aa, synthetic construct
  REGION 1..10: note = short peptide
KMPKVKMPKF

SEQ ID NO: 6996 - protein, 10 aa, synthetic construct
  REGION 1..10: note = short peptide
KMPKVKMPKF

SEQ ID NO: 6997 - protein, 9 aa, synthetic construct
  REGION 1..9: note = short peptide
LPSKPKSPL

SEQ ID NO: 6998 - protein, 10 aa, synthetic construct
  REGION 1..10: note = short peptide
KMPKFKMPSF

SEQ ID NO: 6999 - protein, 8 aa, synthetic construct
  REGION 1..8: note = short peptide
LPSRVGEL

SEQ ID NO: 7000 - protein, 9 aa, synthetic construct
  REGION 1..9: note = short peptide
LPTENVDKM

SEQ ID NO: 7001 - protein, 9 aa, synthetic construct
  REGION 1..9: note = short peptide
LPTNASLSF

SEQ ID NO: 7002 - protein, 11 aa, synthetic construct
  REGION 1..11: note = short peptide
LPVELGECPLL

SEQ ID NO: 7003 - protein, 9 aa, synthetic construct
  REGION 1..9: note = short peptide
KMWEVQTGY

SEQ ID NO: 7004 - protein, 11 aa, synthetic construct
  REGION 1..11: note = short peptide
LLQSPSSAKLL

SEQ ID NO: 7005 - protein, 10 aa, synthetic construct
  REGION 1..10: note = short peptide
KNNSLNELMK

SEQ ID NO: 7006 - protein, 9 aa, synthetic construct
  REGION 1..9: note = short peptide
KNNFIPQPI

SEQ ID NO: 7007 - protein, 10 aa, synthetic construct
  REGION 1..10: note = short peptide
KNISHLISAY

SEQ ID NO: 7008 - protein, 9 aa, synthetic construct
  REGION 1..9: note = short peptide
LPDMPDDVL

SEQ ID NO: 7009 - protein, 9 aa, synthetic construct
  REGION 1..9: note = short peptide
LPFPEITKM

SEQ ID NO: 7010 - protein, 10 aa, synthetic construct
  REGION 1..10: note = short peptide
KLQDGSIKMK

SEQ ID NO: 7011 - protein, 13 aa, synthetic construct
  REGION 1..13: note = short peptide
KMLDAEDIVGTAR

SEQ ID NO: 7012 - protein, 8 aa, synthetic construct
  REGION 1..8: note = short peptide
LSCPTVSV

SEQ ID NO: 7013 - protein, 9 aa, synthetic construct
  REGION 1..9: note = short peptide
KMAELVHFL

SEQ ID NO: 7014 - protein, 9 aa, synthetic construct
  REGION 1..9: note = short peptide
KNVLELTLY

SEQ ID NO: 7015 - protein, 13 aa, synthetic construct
  REGION 1..13: note = short peptide
LSKVVNIVPVIAK

SEQ ID NO: 7016 - protein, 11 aa, synthetic construct
  REGION 1..11: note = short peptide
LSLISLANLPP

SEQ ID NO: 7017 - protein, 9 aa, synthetic construct
  REGION 1..9: note = short peptide
LSMPDLDKL

SEQ ID NO: 7018 - protein, 9 aa, synthetic construct
  REGION 1..9: note = short peptide
LSNNAIHSL

SEQ ID NO: 7019 - protein, 9 aa, synthetic construct
  REGION 1..9: note = short peptide
LSTPRAGPP

SEQ ID NO: 7020 - protein, 11 aa, synthetic construct
  REGION 1..11: note = short peptide
KLRATGGNRTK

SEQ ID NO: 7021 - protein, 10 aa, synthetic construct
  REGION 1..10: note = short peptide
KLQVNTPLVG

SEQ ID NO: 7022 - protein, 10 aa, synthetic construct
  REGION 1..10: note = short peptide
KMALPMPTKR

SEQ ID NO: 7023 - protein, 9 aa, synthetic construct
  REGION 1..9: note = short peptide
KMAPTVLVH

SEQ ID NO: 7024 - protein, 10 aa, synthetic construct
  REGION 1..10: note = short peptide
KMKENPMTNR

SEQ ID NO: 7025 - protein, 12 aa, synthetic construct
  REGION 1..12: note = short peptide
LPWSADRAIQQF

SEQ ID NO: 7026 - protein, 14 aa, synthetic construct
  REGION 1..14: note = short peptide
KMKPVPDLVPGNFK

SEQ ID NO: 7027 - protein, 8 aa, synthetic construct
  REGION 1..8: note = short peptide
LPYNPMMV

SEQ ID NO: 7028 - protein, 12 aa, synthetic construct
  REGION 1..12: note = short peptide
KMKGTLIDNQFK

SEQ ID NO: 7029 - protein, 9 aa, synthetic construct
  REGION 1..9: note = short peptide
KMKETAENY

SEQ ID NO: 7030 - protein, 9 aa, synthetic construct
  REGION 1..9: note = short peptide
KNSVNSHTI

SEQ ID NO: 7031 - protein, 13 aa, synthetic construct
  REGION 1..13: note = short peptide
KMIDRIFSGAVTR

SEQ ID NO: 7032 - protein, 9 aa, synthetic construct
  REGION 1..9: note = short peptide
KMFVGGLSW

SEQ ID NO: 7033 - protein, 9 aa, synthetic construct
  REGION 1..9: note = short peptide
KMFSHQVQK

SEQ ID NO: 7034 - protein, 9 aa, synthetic construct
  REGION 1..9: note = short peptide
KKQQRKPLR

SEQ ID NO: 7035 - protein, 9 aa, synthetic construct
  REGION 1..9: note = short peptide
KKPNKKEQL

SEQ ID NO: 7036 - protein, 9 aa, synthetic construct
  REGION 1..9: note = short peptide
MPMVTDNKM

SEQ ID NO: 7037 - protein, 9 aa, synthetic construct
  REGION 1..9: note = short peptide
MPMVTDNKM

SEQ ID NO: 7038 - protein, 9 aa, synthetic construct
  REGION 1..9: note = short peptide
MPMVTDNKM

SEQ ID NO: 7039 - protein, 9 aa, synthetic construct
  REGION 1..9: note = short peptide
KGTTEGKPS

SEQ ID NO: 7040 - protein, 11 aa, synthetic construct
  REGION 1..11: note = short peptide
MPNGTPHPTAA

SEQ ID NO: 7041 - protein, 15 aa, synthetic construct
  REGION 1..15: note = short peptide
KGSDTDSEHSAAGSP

SEQ ID NO: 7042 - protein, 10 aa, synthetic construct
  REGION 1..10: note = short peptide
MPNKQPESSL

SEQ ID NO: 7043 - protein, 10 aa, synthetic construct
  REGION 1..10: note = short peptide
KGRLLGKGGF

SEQ ID NO: 7044 - protein, 9 aa, synthetic construct
  REGION 1..9: note = short peptide
MPNVKVAVF

SEQ ID NO: 7045 - protein, 11 aa, synthetic construct
  REGION 1..11: note = short peptide
KPFPTSGRAEA

SEQ ID NO: 7046 - protein, 12 aa, synthetic construct
  REGION 1..12: note = short peptide
KGLHLNMALVLS

SEQ ID NO: 7047 - protein, 9 aa, synthetic construct
  REGION 1..9: note = short peptide
KGTVAGVIL

SEQ ID NO: 7048 - protein, 12 aa, synthetic construct
  REGION 1..12: note = short peptide
MPMPTEGTPPPL

SEQ ID NO: 7049 - protein, 9 aa, synthetic construct
  REGION 1..9: note = short peptide
MPKFSMPGF

SEQ ID NO: 7050 - protein, 9 aa, synthetic construct
  REGION 1..9: note = short peptide
MPKKSSVVL

SEQ ID NO: 7051 - protein, 9 aa, synthetic construct
  REGION 1..9: note = short peptide
MPKPPNLIM

SEQ ID NO: 7052 - protein, 11 aa, synthetic construct
  REGION 1..11: note = short peptide
MPKSDVNKEYY

SEQ ID NO: 7053 - protein, 11 aa, synthetic construct
  REGION 1..11: note = short peptide
KHGPEAVETLF

SEQ ID NO: 7054 - protein, 11 aa, synthetic construct
  REGION 1..11: note = short peptide
KGYGLGSGISL

SEQ ID NO: 7055 - protein, 10 aa, synthetic construct
  REGION 1..10: note = short peptide
MPLLKSEVAA

SEQ ID NO: 7056 - protein, 9 aa, synthetic construct
  REGION 1..9: note = short peptide
MPLPGTKAL

SEQ ID NO: 7057 - protein, 12 aa, synthetic construct
  REGION 1..12: note = short peptide
MPLPGTKALPSM

SEQ ID NO: 7058 - protein, 12 aa, synthetic construct
  REGION 1..12: note = short peptide
MPLPTELGDPRL

SEQ ID NO: 7059 - protein, 9 aa, synthetic construct
  REGION 1..9: note = short peptide
MPLSTIREV

SEQ ID NO: 7060 - protein, 12 aa, synthetic construct
  REGION 1..12: note = short peptide
KGKNQKVLSKNL

SEQ ID NO: 7061 - protein, 8 aa, synthetic construct
  REGION 1..8: note = short peptide
KGCLSTYF

SEQ ID NO: 7062 - protein, 9 aa, synthetic construct
  REGION 1..9: note = short peptide
KGARGVAGK

SEQ ID NO: 7063 - protein, 9 aa, synthetic construct
  REGION 1..9: note = short peptide
MPVGPAPGM

SEQ ID NO: 7064 - protein, 9 aa, synthetic construct
  REGION 1..9: note = short peptide
MPVGPAPGM

SEQ ID NO: 7065 - protein, 9 aa, synthetic construct
  REGION 1..9: note = short peptide
MPVGPAPGM

SEQ ID NO: 7066 - protein, 8 aa, synthetic construct
  REGION 1..8: note = short peptide
KFKAQETR

SEQ ID NO: 7067 - protein, 11 aa, synthetic construct
  REGION 1..11: note = short peptide
MPVGPDAILRY

SEQ ID NO: 7068 - protein, 9 aa, synthetic construct
  REGION 1..9: note = short peptide
LGGLFVLTK

SEQ ID NO: 7069 - protein, 13 aa, synthetic construct
  REGION 1..13: note = short peptide
MPVIFGKSSGPEF

SEQ ID NO: 7070 - protein, 9 aa, synthetic construct
  REGION 1..9: note = short peptide
KFDNKTVTF

SEQ ID NO: 7071 - protein, 11 aa, synthetic construct
  REGION 1..11: note = short peptide
KEYEPEMGKVY

SEQ ID NO: 7072 - protein, 11 aa, synthetic construct
  REGION 1..11: note = short peptide
KEYEPEMGKVY

SEQ ID NO: 7073 - protein, 11 aa, synthetic construct
  REGION 1..11: note = short peptide
LGATLLRDIPF

SEQ ID NO: 7074 - protein, 9 aa, synthetic construct
  REGION 1..9: note = short peptide
KGDYQKALL

SEQ ID NO: 7075 - protein, 8 aa, synthetic construct
  REGION 1..8: note = short peptide
KGEHALVL

SEQ ID NO: 7076 - protein, 8 aa, synthetic construct
  REGION 1..8: note = short peptide
KGHVKMLR

SEQ ID NO: 7077 - protein, 11 aa, synthetic construct
  REGION 1..11: note = short peptide
MPSPATLSHSL

SEQ ID NO: 7078 - protein, 14 aa, synthetic construct
  REGION 1..14: note = short peptide
KGKGASGSFVVVQK

SEQ ID NO: 7079 - protein, 10 aa, synthetic construct
  REGION 1..10: note = short peptide
KGISDLAQHY

SEQ ID NO: 7080 - protein, 9 aa, synthetic construct
  REGION 1..9: note = short peptide
MPSSPKQAR

SEQ ID NO: 7081 - protein, 8 aa, synthetic construct
  REGION 1..8: note = short peptide
KGEHSIVY

SEQ ID NO: 7082 - protein, 9 aa, synthetic construct
  REGION 1..9: note = short peptide
KGGNKKFLV

SEQ ID NO: 7083 - protein, 10 aa, synthetic construct
  REGION 1..10: note = short peptide
KGGGDILKSL

SEQ ID NO: 7084 - protein, 10 aa, synthetic construct
  REGION 1..10: note = short peptide
LGMIGKFSAL

SEQ ID NO: 7085 - protein, 10 aa, synthetic construct
  REGION 1..10: note = short peptide
MPVDPDNEAY

SEQ ID NO: 7086 - protein, 13 aa, synthetic construct
  REGION 1..13: note = short peptide
KKPKKAAGGATPK

SEQ ID NO: 7087 - protein, 11 aa, synthetic construct
  REGION 1..11: note = short peptide
MPEHVLTGDSI

SEQ ID NO: 7088 - protein, 15 aa, synthetic construct
  REGION 1..15: note = short peptide
LKAKKAVLKGVHSHK

SEQ ID NO: 7089 - protein, 10 aa, synthetic construct
  REGION 1..10: note = short peptide
KKASKKKAPP

SEQ ID NO: 7090 - protein, 10 aa, synthetic construct
  REGION 1..10: note = short peptide
MPANGETVTL

SEQ ID NO: 7091 - protein, 9 aa, synthetic construct
  REGION 1..9: note = short peptide
MPAPEIVSY

SEQ ID NO: 7092 - protein, 11 aa, synthetic construct
  REGION 1..11: note = short peptide
MPDGQFKDISL

SEQ ID NO: 7093 - protein, 11 aa, synthetic construct
  REGION 1..11: note = short peptide
MPDGQFKDISL

SEQ ID NO: 7094 - protein, 10 aa, synthetic construct
  REGION 1..10: note = short peptide
LIGSIGVSGK

SEQ ID NO: 7095 - protein, 12 aa, synthetic construct
  REGION 1..12: note = short peptide
KIYQGEDLPHPK

SEQ ID NO: 7096 - protein, 9 aa, synthetic construct
  REGION 1..9: note = short peptide
MPDSELFEL

SEQ ID NO: 7097 - protein, 8 aa, synthetic construct
  REGION 1..8: note = short peptide
KITDLRGI

SEQ ID NO: 7098 - protein, 12 aa, synthetic construct
  REGION 1..12: note = short peptide
LKEAPEGWQTPK

SEQ ID NO: 7099 - protein, 14 aa, synthetic construct
  REGION 1..14: note = short peptide
MMKTEPRGPGGPLR

SEQ ID NO: 7100 - protein, 15 aa, synthetic construct
  REGION 1..15: note = short peptide
LKLVPPMEEDYPQFG

SEQ ID NO: 7101 - protein, 14 aa, synthetic construct
  REGION 1..14: note = short peptide
LKLVPPMEEDYPQF

SEQ ID NO: 7102 - protein, 11 aa, synthetic construct
  REGION 1..11: note = short peptide
MPAAQEGAVAF

SEQ ID NO: 7103 - protein, 8 aa, synthetic construct
  REGION 1..8: note = short peptide
MNLQAQPK

SEQ ID NO: 7104 - protein, 8 aa, synthetic construct
  REGION 1..8: note = short peptide
KKGTIPSL

SEQ ID NO: 7105 - protein, 8 aa, synthetic construct
  REGION 1..8: note = short peptide
KKGGPLRA

SEQ ID NO: 7106 - protein, 9 aa, synthetic construct
  REGION 1..9: note = short peptide
MPAAALNAA

SEQ ID NO: 7107 - protein, 15 aa, synthetic construct
  REGION 1..15: note = short peptide
LKKALAAAGYDVEKN

SEQ ID NO: 7108 - protein, 10 aa, synthetic construct
  REGION 1..10: note = short peptide
MPEDVKNFYL

SEQ ID NO: 7109 - protein, 10 aa, synthetic construct
  REGION 1..10: note = short peptide
MPEQIVIHAL

SEQ ID NO: 7110 - protein, 11 aa, synthetic construct
  REGION 1..11: note = short peptide
MPIKNTNQDIY

SEQ ID NO: 7111 - protein, 12 aa, synthetic construct
  REGION 1..12: note = short peptide
KISLAPTDVKEL

SEQ ID NO: 7112 - protein, 9 aa, synthetic construct
  REGION 1..9: note = short peptide
MPHDAIILL

SEQ ID NO: 7113 - protein, 10 aa, synthetic construct
  REGION 1..10: note = short peptide
MPHEDCITAL

SEQ ID NO: 7114 - protein, 9 aa, synthetic construct
  REGION 1..9: note = short peptide
MPHEKHYTL

SEQ ID NO: 7115 - protein, 9 aa, synthetic construct
  REGION 1..9: note = short peptide
KIFKNFKEK

SEQ ID NO: 7116 - protein, 10 aa, synthetic construct
  REGION 1..10: note = short peptide
KIFEGMPVTF

SEQ ID NO: 7117 - protein, 11 aa, synthetic construct
  REGION 1..11: note = short peptide
KIAGFDSIDKK

SEQ ID NO: 7118 - protein, 9 aa, synthetic construct
  REGION 1..9: note = short peptide
KPAMPMQQA

SEQ ID NO: 7119 - protein, 10 aa, synthetic construct
  REGION 1..10: note = short peptide
MPIEDQLTQI

SEQ ID NO: 7120 - protein, 10 aa, synthetic construct
  REGION 1..10: note = short peptide
MPIHELLSLY

SEQ ID NO: 7121 - protein, 12 aa, synthetic construct
  REGION 1..12: note = short peptide
KIHRAEVTEEFK

SEQ ID NO: 7122 - protein, 10 aa, synthetic construct
  REGION 1..10: note = short peptide
KIIENNTASK

SEQ ID NO: 7123 - protein, 13 aa, synthetic construct
  REGION 1..13: note = short peptide
KIMKDILEKKVEK

SEQ ID NO: 7124 - protein, 8 aa, synthetic construct
  REGION 1..8: note = short peptide
KISKVKYV

SEQ ID NO: 7125 - protein, 10 aa, synthetic construct
  REGION 1..10: note = short peptide
KIRSPGKNHK

SEQ ID NO: 7126 - protein, 14 aa, synthetic construct
  REGION 1..14: note = short peptide
KIRKPPKSKKATPK

SEQ ID NO: 7127 - protein, 13 aa, synthetic construct
  REGION 1..13: note = short peptide
KIRDSAGQKGTGK

SEQ ID NO: 7128 - protein, 8 aa, synthetic construct
  REGION 1..8: note = short peptide
LHVKGTKV

SEQ ID NO: 7129 - protein, 9 aa, synthetic construct
  REGION 1..9: note = short peptide
KIKQSVGNK

SEQ ID NO: 7130 - protein, 9 aa, synthetic construct
  REGION 1..9: note = short peptide
MPFPAHLTY

SEQ ID NO: 7131 - protein, 10 aa, synthetic construct
  REGION 1..10: note = short peptide
MPFPYPLPQP

SEQ ID NO: 7132 - protein, 10 aa, synthetic construct
  REGION 1..10: note = short peptide
MPFSGGQDSF

SEQ ID NO: 7133 - protein, 8 aa, synthetic construct
  REGION 1..8: note = short peptide
HPYIKMVM

SEQ ID NO: 7134 - protein, 9 aa, synthetic construct
  REGION 1..9: note = short peptide
RDPPPPPPP

SEQ ID NO: 7135 - protein, 11 aa, synthetic construct
  REGION 1..11: note = short peptide
KQMEQVAQFLK

SEQ ID NO: 7136 - protein, 15 aa, synthetic construct
  REGION 1..15: note = short peptide
SGPYGGGGQYFAKPQ

SEQ ID NO: 7137 - protein, 9 aa, synthetic construct
  REGION 1..9: note = short peptide
FRHDKRVYL

SEQ ID NO: 7138 - protein, 9 aa, synthetic construct
  REGION 1..9: note = short peptide
FPTQDLPTF

SEQ ID NO: 7139 - protein, 11 aa, synthetic construct
  REGION 1..11: note = short peptide
FPSADEIIIKM

SEQ ID NO: 7140 - protein, 14 aa, synthetic construct
  REGION 1..14: note = short peptide
SGRGKQGGKARAKA

SEQ ID NO: 7141 - protein, 15 aa, synthetic construct
  REGION 1..15: note = short peptide
SGRGKQGGKARAKAK

SEQ ID NO: 7142 - protein, 10 aa, synthetic construct
  REGION 1..10: note = short peptide
FPRPGGPMAA

SEQ ID NO: 7143 - protein, 10 aa, synthetic construct
  REGION 1..10: note = short peptide
KVYIPPIINK

SEQ ID NO: 7144 - protein, 8 aa, synthetic construct
  REGION 1..8: note = short peptide
SGPIRAYI

SEQ ID NO: 7145 - protein, 10 aa, synthetic construct
  REGION 1..10: note = short peptide
FSNASVKVSY

SEQ ID NO: 7146 - protein, 13 aa, synthetic construct
  REGION 1..13: note = short peptide
SFPARVPPPPPIA

SEQ ID NO: 7147 - protein, 9 aa, synthetic construct
  REGION 1..9: note = short peptide
FVEKHFNDL

SEQ ID NO: 7148 - protein, 15 aa, synthetic construct
  REGION 1..15: note = short peptide
SGCGGCGSSCGGCGS

SEQ ID NO: 7149 - protein, 9 aa, synthetic construct
  REGION 1..9: note = short peptide
FVEDGKMDR

SEQ ID NO: 7150 - protein, 9 aa, synthetic construct
  REGION 1..9: note = short peptide
FTKSPYQEF

SEQ ID NO: 7151 - protein, 9 aa, synthetic construct
  REGION 1..9: note = short peptide
FTEGSTDKY

SEQ ID NO: 7152 - protein, 10 aa, synthetic construct
  REGION 1..10: note = short peptide
FTCKVPGLYY

SEQ ID NO: 7153 - protein, 9 aa, synthetic construct
  REGION 1..9: note = short peptide
SGLTSTDAL

SEQ ID NO: 7154 - protein, 12 aa, synthetic construct
  REGION 1..12: note = short peptide
FPMASGPGIIRM

SEQ ID NO: 7155 - protein, 10 aa, synthetic construct
  REGION 1..10: note = short peptide
SIQNVSVVFK

SEQ ID NO: 7156 - protein, 10 aa, synthetic construct
  REGION 1..10: note = short peptide
FMDPEMETRY

SEQ ID NO: 7157 - protein, 10 aa, synthetic construct
  REGION 1..10: note = short peptide
SIRPPHGLLK

SEQ ID NO: 7158 - protein, 11 aa, synthetic construct
  REGION 1..11: note = short peptide
SITNFLVMGGF

SEQ ID NO: 7159 - protein, 14 aa, synthetic construct
  REGION 1..14: note = short peptide
SKGPAVGIDLGTTY

SEQ ID NO: 7160 - protein, 8 aa, synthetic construct
  REGION 1..8: note = short peptide
FNYTVKVL

SEQ ID NO: 7161 - protein, 10 aa, synthetic construct
  REGION 1..10: note = short peptide
FPAGARDPSM

SEQ ID NO: 7162 - protein, 9 aa, synthetic construct
  REGION 1..9: note = short peptide
SHLPMKLLR

SEQ ID NO: 7163 - protein, 9 aa, synthetic construct
  REGION 1..9: note = short peptide
SHEDPEVKF

SEQ ID NO: 7164 - protein, 9 aa, synthetic construct
  REGION 1..9: note = short peptide
SHFDAKLLS

SEQ ID NO: 7165 - protein, 11 aa, synthetic construct
  REGION 1..11: note = short peptide
SHGPKQPGAAA

SEQ ID NO: 7166 - protein, 14 aa, synthetic construct
  REGION 1..14: note = short peptide
KQPVSPVIHPPVSY

SEQ ID NO: 7167 - protein, 14 aa, synthetic construct
  REGION 1..14: note = short peptide
SHLKITDSAGHILY

SEQ ID NO: 7168 - protein, 9 aa, synthetic construct
  REGION 1..9: note = short peptide
SHNGSLINV

SEQ ID NO: 7169 - protein, 11 aa, synthetic construct
  REGION 1..11: note = short peptide
FPENVKAMTSL

SEQ ID NO: 7170 - protein, 9 aa, synthetic construct
  REGION 1..9: note = short peptide
SHSSVILKM

SEQ ID NO: 7171 - protein, 9 aa, synthetic construct
  REGION 1..9: note = short peptide
FVYNITTNK

SEQ ID NO: 7172 - protein, 14 aa, synthetic construct
  REGION 1..14: note = short peptide
GAAAAEADRTLFVG

SEQ ID NO: 7173 - protein, 12 aa, synthetic construct
  REGION 1..12: note = short peptide
GAGAAPGPHLPP

SEQ ID NO: 7174 - protein, 10 aa, synthetic construct
  REGION 1..10: note = short peptide
GENGTGPAKF

SEQ ID NO: 7175 - protein, 9 aa, synthetic construct
  REGION 1..9: note = short peptide
KYFDEHYEY

SEQ ID NO: 7176 - protein, 14 aa, synthetic construct
  REGION 1..14: note = short peptide
GFRTHFGGGKTTGF

SEQ ID NO: 7177 - protein, 14 aa, synthetic construct
  REGION 1..14: note = short peptide
GFMKRYGGFMKKMD

SEQ ID NO: 7178 - protein, 10 aa, synthetic construct
  REGION 1..10: note = short peptide
SARQTFPPGR

SEQ ID NO: 7179 - protein, 14 aa, synthetic construct
  REGION 1..14: note = short peptide
SATNNIAQARKLVE

SEQ ID NO: 7180 - protein, 12 aa, synthetic construct
  REGION 1..12: note = short peptide
GERGPPGESGAA

SEQ ID NO: 7181 - protein, 13 aa, synthetic construct
  REGION 1..13: note = short peptide
GERGEQGPAGSPG

SEQ ID NO: 7182 - protein, 15 aa, synthetic construct
  REGION 1..15: note = short peptide
RYYNQSEAGSHTLQR

SEQ ID NO: 7183 - protein, 13 aa, synthetic construct
  REGION 1..13: note = short peptide
SAAGFIANLSVQR

SEQ ID NO: 7184 - protein, 15 aa, synthetic construct
  REGION 1..15: note = short peptide
SAAKILADATAKMVE

SEQ ID NO: 7185 - protein, 13 aa, synthetic construct
  REGION 1..13: note = short peptide
GGPGTASRPSSSR

SEQ ID NO: 7186 - protein, 8 aa, synthetic construct
  REGION 1..8: note = short peptide
GGINLHKA

SEQ ID NO: 7187 - protein, 11 aa, synthetic construct
  REGION 1..11: note = short peptide
SAGLASANSNV

SEQ ID NO: 7188 - protein, 12 aa, synthetic construct
  REGION 1..12: note = short peptide
SAGLGFSLEGGK

SEQ ID NO: 7189 - protein, 8 aa, synthetic construct
  REGION 1..8: note = short peptide
SAGPMRLY

SEQ ID NO: 7190 - protein, 12 aa, synthetic construct
  REGION 1..12: note = short peptide
GGMSLRGQNLLR

SEQ ID NO: 7191 - protein, 12 aa, synthetic construct
  REGION 1..12: note = short peptide
GGMSLRGQNLLR

SEQ ID NO: 7192 - protein, 9 aa, synthetic construct
  REGION 1..9: note = short peptide
SDDSVPVIS

SEQ ID NO: 7193 - protein, 8 aa, synthetic construct
  REGION 1..8: note = short peptide
SEVNFFKV

SEQ ID NO: 7194 - protein, 9 aa, synthetic construct
  REGION 1..9: note = short peptide
GELPEGTSI

SEQ ID NO: 7195 - protein, 10 aa, synthetic construct
  REGION 1..10: note = short peptide
SEIKGEVLYL

SEQ ID NO: 7196 - protein, 9 aa, synthetic construct
  REGION 1..9: note = short peptide
GDDISVFVI

SEQ ID NO: 7197 - protein, 10 aa, synthetic construct
  REGION 1..10: note = short peptide
SELEKAMVAL

SEQ ID NO: 7198 - protein, 10 aa, synthetic construct
  REGION 1..10: note = short peptide
GASPLPLPMY

SEQ ID NO: 7199 - protein, 9 aa, synthetic construct
  REGION 1..9: note = short peptide
GARPPRLPL

SEQ ID NO: 7200 - protein, 14 aa, synthetic construct
  REGION 1..14: note = short peptide
KQKRTPKRTSAAAK

SEQ ID NO: 7201 - protein, 13 aa, synthetic construct
  REGION 1..13: note = short peptide
GAIDHISIRQLQL

SEQ ID NO: 7202 - protein, 9 aa, synthetic construct
  REGION 1..9: note = short peptide
KYAHKLAFL

SEQ ID NO: 7203 - protein, 9 aa, synthetic construct
  REGION 1..9: note = short peptide
SDYPPLGRF

SEQ ID NO: 7204 - protein, 10 aa, synthetic construct
  REGION 1..10: note = short peptide
KQIASDLIKY

SEQ ID NO: 7205 - protein, 9 aa, synthetic construct
  REGION 1..9: note = short peptide
GEISTLQSL

SEQ ID NO: 7206 - protein, 13 aa, synthetic construct
  REGION 1..13: note = short peptide
GEFLGMKGFKGQL

SEQ ID NO: 7207 - protein, 9 aa, synthetic construct
  REGION 1..9: note = short peptide
KQGPMTQAI

SEQ ID NO: 7208 - protein, 11 aa, synthetic construct
  REGION 1..11: note = short peptide
GDSTFESKSYK

SEQ ID NO: 7209 - protein, 9 aa, synthetic construct
  REGION 1..9: note = short peptide
GEAERFMTP

SEQ ID NO: 7210 - protein, 13 aa, synthetic construct
  REGION 1..13: note = short peptide
GEAEAAKMLGEAL

SEQ ID NO: 7211 - protein, 8 aa, synthetic construct
  REGION 1..8: note = short peptide
KNQSVNVF

SEQ ID NO: 7212 - protein, 9 aa, synthetic construct
  REGION 1..9: note = short peptide
GDSVKASKF

SEQ ID NO: 7213 - protein, 10 aa, synthetic construct
  REGION 1..10: note = short peptide
SKHPAAAAAA

SEQ ID NO: 7214 - protein, 8 aa, synthetic construct
  REGION 1..8: note = short peptide
SPIPSPVL

SEQ ID NO: 7215 - protein, 9 aa, synthetic construct
  REGION 1..9: note = short peptide
SPKKAKAAA

SEQ ID NO: 7216 - protein, 9 aa, synthetic construct
  REGION 1..9: note = short peptide
SPKKDVLSL

SEQ ID NO: 7217 - protein, 9 aa, synthetic construct
  REGION 1..9: note = short peptide
SPLCPLSPL

SEQ ID NO: 7218 - protein, 10 aa, synthetic construct
  REGION 1..10: note = short peptide
SPLQKGLLAA

SEQ ID NO: 7219 - protein, 11 aa, synthetic construct
  REGION 1..11: note = short peptide
ENIGYVLYGIY

SEQ ID NO: 7220 - protein, 9 aa, synthetic construct
  REGION 1..9: note = short peptide
ELVGHKVNL

SEQ ID NO: 7221 - protein, 9 aa, synthetic construct
  REGION 1..9: note = short peptide
SPIDVVEKY

SEQ ID NO: 7222 - protein, 9 aa, synthetic construct
  REGION 1..9: note = short peptide
ERDPSKIKW

SEQ ID NO: 7223 - protein, 12 aa, synthetic construct
  REGION 1..12: note = short peptide
KVMVTNVTSLLK

SEQ ID NO: 7224 - protein, 11 aa, synthetic construct
  REGION 1..11: note = short peptide
ETADTLLALRY

SEQ ID NO: 7225 - protein, 10 aa, synthetic construct
  REGION 1..10: note = short peptide
ETADFKVYTK

SEQ ID NO: 7226 - protein, 13 aa, synthetic construct
  REGION 1..13: note = short peptide
SNVLAAMRKAAAK

SEQ ID NO: 7227 - protein, 11 aa, synthetic construct
  REGION 1..11: note = short peptide
ESAPEGQAQQR

SEQ ID NO: 7228 - protein, 12 aa, synthetic construct
  REGION 1..12: note = short peptide
KVMDEVEKARAK

SEQ ID NO: 7229 - protein, 9 aa, synthetic construct
  REGION 1..9: note = short peptide
SPGAKFSHI

SEQ ID NO: 7230 - protein, 11 aa, synthetic construct
  REGION 1..11: note = short peptide
ESAIPNQTALY

SEQ ID NO: 7231 - protein, 8 aa, synthetic construct
  REGION 1..8: note = short peptide
KVNFPPFL

SEQ ID NO: 7232 - protein, 9 aa, synthetic construct
  REGION 1..9: note = short peptide
SPTRPPVAA

SEQ ID NO: 7233 - protein, 9 aa, synthetic construct
  REGION 1..9: note = short peptide
SPTRPPVAA

SEQ ID NO: 7234 - protein, 9 aa, synthetic construct
  REGION 1..9: note = short peptide
EHAGVISVL

SEQ ID NO: 7235 - protein, 9 aa, synthetic construct
  REGION 1..9: note = short peptide
SQHYHQGYY

SEQ ID NO: 7236 - protein, 9 aa, synthetic construct
  REGION 1..9: note = short peptide
EGKVATTVI

SEQ ID NO: 7237 - protein, 9 aa, synthetic construct
  REGION 1..9: note = short peptide
SQQSKVSGY

SEQ ID NO: 7238 - protein, 10 aa, synthetic construct
  REGION 1..10: note = short peptide
SQTRDLQGGK

SEQ ID NO: 7239 - protein, 13 aa, synthetic construct
  REGION 1..13: note = short peptide
SQTRDLQGGKAFG

SEQ ID NO: 7240 - protein, 14 aa, synthetic construct
  REGION 1..14: note = short peptide
SPTPQKTSAKSPGP

SEQ ID NO: 7241 - protein, 15 aa, synthetic construct
  REGION 1..15: note = short peptide
EKSKEALLASQKPFK

SEQ ID NO: 7242 - protein, 9 aa, synthetic construct
  REGION 1..9: note = short peptide
ELLRFLESL

SEQ ID NO: 7243 - protein, 9 aa, synthetic construct
  REGION 1..9: note = short peptide
SPQKVGALI

SEQ ID NO: 7244 - protein, 15 aa, synthetic construct
  REGION 1..15: note = short peptide
ELDVPLPDIDYMEIP

SEQ ID NO: 7245 - protein, 10 aa, synthetic construct
  REGION 1..10: note = short peptide
EIYDCKVEHW

SEQ ID NO: 7246 - protein, 9 aa, synthetic construct
  REGION 1..9: note = short peptide
EIVPKVAKM

SEQ ID NO: 7247 - protein, 10 aa, synthetic construct
  REGION 1..10: note = short peptide
SNRHGLIRKY

SEQ ID NO: 7248 - protein, 9 aa, synthetic construct
  REGION 1..9: note = short peptide
KVWYPMTGW

SEQ ID NO: 7249 - protein, 8 aa, synthetic construct
  REGION 1..8: note = short peptide
FFVSRFSA

SEQ ID NO: 7250 - protein, 12 aa, synthetic construct
  REGION 1..12: note = short peptide
KVSMPDVDLNLK

SEQ ID NO: 7251 - protein, 9 aa, synthetic construct
  REGION 1..9: note = short peptide
SLKANIPEV

SEQ ID NO: 7252 - protein, 10 aa, synthetic construct
  REGION 1..10: note = short peptide
FESNGSFLCK

SEQ ID NO: 7253 - protein, 12 aa, synthetic construct
  REGION 1..12: note = short peptide
FEGFPDKQPRKK

SEQ ID NO: 7254 - protein, 14 aa, synthetic construct
  REGION 1..14: note = short peptide
FEEMRKAGIFQSVK

SEQ ID NO: 7255 - protein, 15 aa, synthetic construct
  REGION 1..15: note = short peptide
FDYKEKLAKHESQQD

SEQ ID NO: 7256 - protein, 12 aa, synthetic construct
  REGION 1..12: note = short peptide
KVSMPDVDLNLK

SEQ ID NO: 7257 - protein, 8 aa, synthetic construct
  REGION 1..8: note = short peptide
SLKLVDCI

SEQ ID NO: 7258 - protein, 8 aa, synthetic construct
  REGION 1..8: note = short peptide
SLKRVGPV

SEQ ID NO: 7259 - protein, 8 aa, synthetic construct
  REGION 1..8: note = short peptide
SLHPAHPA

SEQ ID NO: 7260 - protein, 8 aa, synthetic construct
  REGION 1..8: note = short peptide
SLHEHEPA

SEQ ID NO: 7261 - protein, 9 aa, synthetic construct
  REGION 1..9: note = short peptide
SKNAVIRII

SEQ ID NO: 7262 - protein, 9 aa, synthetic construct
  REGION 1..9: note = short peptide
KVVVSPTKK

SEQ ID NO: 7263 - protein, 14 aa, synthetic construct
  REGION 1..14: note = short peptide
SKRGRGGSSGAKFR

SEQ ID NO: 7264 - protein, 13 aa, synthetic construct
  REGION 1..13: note = short peptide
KQYKKAHLGTALK

SEQ ID NO: 7265 - protein, 11 aa, synthetic construct
  REGION 1..11: note = short peptide
FIFNQTGIEAK

SEQ ID NO: 7266 - protein, 10 aa, synthetic construct
  REGION 1..10: note = short peptide
SLFGGKPMII

SEQ ID NO: 7267 - protein, 15 aa, synthetic construct
  REGION 1..15: note = short peptide
FGSRSLYNLGGAKRV

SEQ ID NO: 7268 - protein, 10 aa, synthetic construct
  REGION 1..10: note = short peptide
SLMDHTIPEV

SEQ ID NO: 7269 - protein, 11 aa, synthetic construct
  REGION 1..11: note = short peptide
SLNEEIAFLKK

SEQ ID NO: 7270 - protein, 9 aa, synthetic construct
  REGION 1..9: note = short peptide
SNMEKHLFN

SEQ ID NO: 7271 - protein, 9 aa, synthetic construct
  REGION 1..9: note = short peptide
SLNRAQLTF

SEQ ID NO: 7272 - protein, 9 aa, synthetic construct
  REGION 1..9: note = short peptide
KRKSVDTQL

SEQ ID NO: 7273 - protein, 14 aa, synthetic construct
  REGION 1..14: note = short peptide
EVEGLEANEGSKTL

SEQ ID NO: 7274 - protein, 9 aa, synthetic construct
  REGION 1..9: note = short peptide
EVEGKMVSR

SEQ ID NO: 7275 - protein, 12 aa, synthetic construct
  REGION 1..12: note = short peptide
EVANSTANLVKT

SEQ ID NO: 7276 - protein, 14 aa, synthetic construct
  REGION 1..14: note = short peptide
EVAGDPIFPPGPPS

SEQ ID NO: 7277 - protein, 15 aa, synthetic construct
  REGION 1..15: note = short peptide
SMLRLQKRLASSVLR

SEQ ID NO: 7278 - protein, 11 aa, synthetic construct
  REGION 1..11: note = short peptide
EVADEKMLSGL

SEQ ID NO: 7279 - protein, 11 aa, synthetic construct
  REGION 1..11: note = short peptide
EVAAPGWAQVR

SEQ ID NO: 7280 - protein, 9 aa, synthetic construct
  REGION 1..9: note = short peptide
SMRKSGAMK

SEQ ID NO: 7281 - protein, 14 aa, synthetic construct
  REGION 1..14: note = short peptide
SNFGPMKGGNFGGR

SEQ ID NO: 7282 - protein, 10 aa, synthetic construct
  REGION 1..10: note = short peptide
ETNYTRIFLY

SEQ ID NO: 7283 - protein, 10 aa, synthetic construct
  REGION 1..10: note = short peptide
ETMGINGSAY

SEQ ID NO: 7284 - protein, 10 aa, synthetic construct
  REGION 1..10: note = short peptide
KRKTGVSRGF

SEQ ID NO: 7285 - protein, 11 aa, synthetic construct
  REGION 1..11: note = short peptide
SMAQAMKGVTK

SEQ ID NO: 7286 - protein, 13 aa, synthetic construct
  REGION 1..13: note = short peptide
KVNVFRKSRRQRK

SEQ ID NO: 7287 - protein, 15 aa, synthetic construct
  REGION 1..15: note = short peptide
EVGVNAENVWSDCIS

SEQ ID NO: 7288 - protein, 14 aa, synthetic construct
  REGION 1..14: note = short peptide
KVQHIQLLQKNVRA

SEQ ID NO: 7289 - protein, 9 aa, synthetic construct
  REGION 1..9: note = short peptide
KVQTAVTMK

SEQ ID NO: 7290 - protein, 12 aa, synthetic construct
  REGION 1..12: note = short peptide
KRAPVPVRGGPK

SEQ ID NO: 7291 - protein, 11 aa, synthetic construct
  REGION 1..11: note = short peptide
EVYPPGPYHPF

SEQ ID NO: 7292 - protein, 9 aa, synthetic construct
  REGION 1..9: note = short peptide
EVVVHKKMR

SEQ ID NO: 7293 - protein, 9 aa, synthetic construct
  REGION 1..9: note = short peptide
SLRGQNLLR

SEQ ID NO: 7294 - protein, 10 aa, synthetic construct
  REGION 1..10: note = short peptide
SLYPSLEDLK

SEQ ID NO: 7295 - protein, 10 aa, synthetic construct
  REGION 1..10: note = short peptide
SLVIPEKFQH

SEQ ID NO: 7296 - protein, 10 aa, synthetic construct
  REGION 1..10: note = short peptide
EVIRELICYC

SEQ ID NO: 7297 - protein, 10 aa, synthetic construct
  REGION 1..10: note = short peptide
EVILIDPFHK

SEQ ID NO: 7298 - protein, 13 aa, synthetic construct
  REGION 1..13: note = short peptide
SLVLVCVLAALCF

SEQ ID NO: 7299 - protein, 13 aa, synthetic construct
  REGION 1..13: note = short peptide
GHQQLYWSHPRKF

SEQ ID NO: 7300 - protein, 9 aa, synthetic construct
  REGION 1..9: note = short peptide
RNSDSFLKM

SEQ ID NO: 7301 - protein, 12 aa, synthetic construct
  REGION 1..12: note = short peptide
RLRSPSNDSAHR

SEQ ID NO: 7302 - protein, 12 aa, synthetic construct
  REGION 1..12: note = short peptide
RMFESENKILSK

SEQ ID NO: 7303 - protein, 12 aa, synthetic construct
  REGION 1..12: note = short peptide
RMKKLDEEALLK

SEQ ID NO: 7304 - protein, 11 aa, synthetic construct
  REGION 1..11: note = short peptide
HFELGGDKKRK

SEQ ID NO: 7305 - protein, 15 aa, synthetic construct
  REGION 1..15: note = short peptide
HFDLSHGSAQVKGHG

SEQ ID NO: 7306 - protein, 13 aa, synthetic construct
  REGION 1..13: note = short peptide
RMKTGNKIRYNSK

SEQ ID NO: 7307 - protein, 8 aa, synthetic construct
  REGION 1..8: note = short peptide
RMRTSFKH

SEQ ID NO: 7308 - protein, 10 aa, synthetic construct
  REGION 1..10: note = short peptide
RMVLGDIADR

SEQ ID NO: 7309 - protein, 10 aa, synthetic construct
  REGION 1..10: note = short peptide
RMVTGNGSLK

SEQ ID NO: 7310 - protein, 15 aa, synthetic construct
  REGION 1..15: note = short peptide
HGSAQVKGHGKKVAD

SEQ ID NO: 7311 - protein, 13 aa, synthetic construct
  REGION 1..13: note = short peptide
RLQDGASKMKQAF

SEQ ID NO: 7312 - protein, 8 aa, synthetic construct
  REGION 1..8: note = short peptide
KYSKLLSM

SEQ ID NO: 7313 - protein, 9 aa, synthetic construct
  REGION 1..9: note = short peptide
RLFPMTPNW

SEQ ID NO: 7314 - protein, 8 aa, synthetic construct
  REGION 1..8: note = short peptide
RLHEFLRE

SEQ ID NO: 7315 - protein, 10 aa, synthetic construct
  REGION 1..10: note = short peptide
RLKGPLLNKF

SEQ ID NO: 7316 - protein, 10 aa, synthetic construct
  REGION 1..10: note = short peptide
RLPPGTPKAK

SEQ ID NO: 7317 - protein, 10 aa, synthetic construct
  REGION 1..10: note = short peptide
KPPADSGVDL

SEQ ID NO: 7318 - protein, 11 aa, synthetic construct
  REGION 1..11: note = short peptide
RLLDSEIKIMK

SEQ ID NO: 7319 - protein, 11 aa, synthetic construct
  REGION 1..11: note = short peptide
RLLHFVAPKHT

SEQ ID NO: 7320 - protein, 9 aa, synthetic construct
  REGION 1..9: note = short peptide
RLMKVFVTR

SEQ ID NO: 7321 - protein, 9 aa, synthetic construct
  REGION 1..9: note = short peptide
RNHRGFKRV

SEQ ID NO: 7322 - protein, 9 aa, synthetic construct
  REGION 1..9: note = short peptide
RNSFRYNGL

SEQ ID NO: 7323 - protein, 8 aa, synthetic construct
  REGION 1..8: note = short peptide
RNSTVNRF

SEQ ID NO: 7324 - protein, 8 aa, synthetic construct
  REGION 1..8: note = short peptide
HAFITKFN

SEQ ID NO: 7325 - protein, 15 aa, synthetic construct
  REGION 1..15: note = short peptide
GWQTPPGWQTPPGWQ

SEQ ID NO: 7326 - protein, 11 aa, synthetic construct
  REGION 1..11: note = short peptide
GVIGLLEPMKK

SEQ ID NO: 7327 - protein, 9 aa, synthetic construct
  REGION 1..9: note = short peptide
GVDRIPLGR

SEQ ID NO: 7328 - protein, 13 aa, synthetic construct
  REGION 1..13: note = short peptide
HAVSEGTKAVTKY

SEQ ID NO: 7329 - protein, 8 aa, synthetic construct
  REGION 1..8: note = short peptide
HEGFLFRL

SEQ ID NO: 7330 - protein, 9 aa, synthetic construct
  REGION 1..9: note = short peptide
HESCGSYQR

SEQ ID NO: 7331 - protein, 9 aa, synthetic construct
  REGION 1..9: note = short peptide
KYPNMFKKI

SEQ ID NO: 7332 - protein, 12 aa, synthetic construct
  REGION 1..12: note = short peptide
HEIFTDPRTMGY

SEQ ID NO: 7333 - protein, 11 aa, synthetic construct
  REGION 1..11: note = short peptide
RPAQSVNRGGM

SEQ ID NO: 7334 - protein, 9 aa, synthetic construct
  REGION 1..9: note = short peptide
RPFERTITM

SEQ ID NO: 7335 - protein, 9 aa, synthetic construct
  REGION 1..9: note = short peptide
HEDGPAAEK

SEQ ID NO: 7336 - protein, 9 aa, synthetic construct
  REGION 1..9: note = short peptide
HDQFKATLP

SEQ ID NO: 7337 - protein, 8 aa, synthetic construct
  REGION 1..8: note = short peptide
HDIIKHPM

SEQ ID NO: 7338 - protein, 8 aa, synthetic construct
  REGION 1..8: note = short peptide
RKYVSQKK

SEQ ID NO: 7339 - protein, 14 aa, synthetic construct
  REGION 1..14: note = short peptide
RKTVTAMDVVYALK

SEQ ID NO: 7340 - protein, 10 aa, synthetic construct
  REGION 1..10: note = short peptide
HLQTVQQNTI

SEQ ID NO: 7341 - protein, 15 aa, synthetic construct
  REGION 1..15: note = short peptide
HPGSSRGGRQGSHYE

SEQ ID NO: 7342 - protein, 8 aa, synthetic construct
  REGION 1..8: note = short peptide
LAHLRAAP

SEQ ID NO: 7343 - protein, 8 aa, synthetic construct
  REGION 1..8: note = short peptide
RGGEVVHR

SEQ ID NO: 7344 - protein, 8 aa, synthetic construct
  REGION 1..8: note = short peptide
LAAAGVGR

SEQ ID NO: 7345 - protein, 9 aa, synthetic construct
  REGION 1..9: note = short peptide
HLVDGKSPR

SEQ ID NO: 7346 - protein, 9 aa, synthetic construct
  REGION 1..9: note = short peptide
HLVARAKTL

SEQ ID NO: 7347 - protein, 9 aa, synthetic construct
  REGION 1..9: note = short peptide
HPGTVVTVL

SEQ ID NO: 7348 - protein, 12 aa, synthetic construct
  REGION 1..12: note = short peptide
HPKPGAAGSVGA

SEQ ID NO: 7349 - protein, 9 aa, synthetic construct
  REGION 1..9: note = short peptide
REAGFQVKA

SEQ ID NO: 7350 - protein, 8 aa, synthetic construct
  REGION 1..8: note = short peptide
LAKIGYLV

SEQ ID NO: 7351 - protein, 9 aa, synthetic construct
  REGION 1..9: note = short peptide
REEAERVRQ

SEQ ID NO: 7352 - protein, 13 aa, synthetic construct
  REGION 1..13: note = short peptide
HPISSEELLSLKY

SEQ ID NO: 7353 - protein, 9 aa, synthetic construct
  REGION 1..9: note = short peptide
RELRELNLR

SEQ ID NO: 7354 - protein, 10 aa, synthetic construct
  REGION 1..10: note = short peptide
REQPAAGPAA

SEQ ID NO: 7355 - protein, 9 aa, synthetic construct
  REGION 1..9: note = short peptide
HPHPVVPKM

SEQ ID NO: 7356 - protein, 11 aa, synthetic construct
  REGION 1..11: note = short peptide
HLSSIPSGLPH

SEQ ID NO: 7357 - protein, 9 aa, synthetic construct
  REGION 1..9: note = short peptide
RKTGQAPGY

SEQ ID NO: 7358 - protein, 10 aa, synthetic construct
  REGION 1..10: note = short peptide
RGPPPPYHSK

SEQ ID NO: 7359 - protein, 14 aa, synthetic construct
  REGION 1..14: note = short peptide
RILEQQNSSRTLEK

SEQ ID NO: 7360 - protein, 9 aa, synthetic construct
  REGION 1..9: note = short peptide
RIPPRASNR

SEQ ID NO: 7361 - protein, 12 aa, synthetic construct
  REGION 1..12: note = short peptide
RIYKGVIQAIQK

SEQ ID NO: 7362 - protein, 10 aa, synthetic construct
  REGION 1..10: note = short peptide
HIISGTCASW

SEQ ID NO: 7363 - protein, 8 aa, synthetic construct
  REGION 1..8: note = short peptide
RKEQKHIM

SEQ ID NO: 7364 - protein, 8 aa, synthetic construct
  REGION 1..8: note = short peptide
HIIMYLTL

SEQ ID NO: 7365 - protein, 8 aa, synthetic construct
  REGION 1..8: note = short peptide
RKKTATAV

SEQ ID NO: 7366 - protein, 9 aa, synthetic construct
  REGION 1..9: note = short peptide
HIHKSLIGK

SEQ ID NO: 7367 - protein, 8 aa, synthetic construct
  REGION 1..8: note = short peptide
RKLGSHSV

SEQ ID NO: 7368 - protein, 9 aa, synthetic construct
  REGION 1..9: note = short peptide
HIHKSLIGK

SEQ ID NO: 7369 - protein, 8 aa, synthetic construct
  REGION 1..8: note = short peptide
RKSSASKK

SEQ ID NO: 7370 - protein, 9 aa, synthetic construct
  REGION 1..9: note = short peptide
HHVNGSRPP

SEQ ID NO: 7371 - protein, 8 aa, synthetic construct
  REGION 1..8: note = short peptide
RIFDANTK

SEQ ID NO: 7372 - protein, 10 aa, synthetic construct
  REGION 1..10: note = short peptide
KPNDSRALQL

SEQ ID NO: 7373 - protein, 10 aa, synthetic construct
  REGION 1..10: note = short peptide
RHGAASLGSK

SEQ ID NO: 7374 - protein, 9 aa, synthetic construct
  REGION 1..9: note = short peptide
HLLNRTLHV

SEQ ID NO: 7375 - protein, 8 aa, synthetic construct
  REGION 1..8: note = short peptide
HLKGKARQ

SEQ ID NO: 7376 - protein, 10 aa, synthetic construct
  REGION 1..10: note = short peptide
RHDPNMKYEL

SEQ ID NO: 7377 - protein, 8 aa, synthetic construct
  REGION 1..8: note = short peptide
HLEDLIRK

SEQ ID NO: 7378 - protein, 10 aa, synthetic construct
  REGION 1..10: note = short peptide
RHRRVVGTLH

SEQ ID NO: 7379 - protein, 10 aa, synthetic construct
  REGION 1..10: note = short peptide
RTKAVGTITK

SEQ ID NO: 7380 - protein, 10 aa, synthetic construct
  REGION 1..10: note = short peptide
RTKVHLPGHK

SEQ ID NO: 7381 - protein, 9 aa, synthetic construct
  REGION 1..9: note = short peptide
RTLPWSSVL

SEQ ID NO: 7382 - protein, 14 aa, synthetic construct
  REGION 1..14: note = short peptide
RTPKIQVYSRHPAE

SEQ ID NO: 7383 - protein, 10 aa, synthetic construct
  REGION 1..10: note = short peptide
RTQPMRFVTR

SEQ ID NO: 7384 - protein, 9 aa, synthetic construct
  REGION 1..9: note = short peptide
RTVSPAHVL

SEQ ID NO: 7385 - protein, 11 aa, synthetic construct
  REGION 1..11: note = short peptide
RTISNPEVVMK

SEQ ID NO: 7386 - protein, 9 aa, synthetic construct
  REGION 1..9: note = short peptide
RTIAPIIGR

SEQ ID NO: 7387 - protein, 12 aa, synthetic construct
  REGION 1..12: note = short peptide
RSSGPYGGGGQY

SEQ ID NO: 7388 - protein, 9 aa, synthetic construct
  REGION 1..9: note = short peptide
RSSRTSVSR

SEQ ID NO: 7389 - protein, 9 aa, synthetic construct
  REGION 1..9: note = short peptide
KYISGPHEL

SEQ ID NO: 7390 - protein, 11 aa, synthetic construct
  REGION 1..11: note = short peptide
RTGALSAPRGL

SEQ ID NO: 7391 - protein, 11 aa, synthetic construct
  REGION 1..11: note = short peptide
RVAFPDTRKTY

SEQ ID NO: 7392 - protein, 12 aa, synthetic construct
  REGION 1..12: note = short peptide
GPGLPAPLQAGP

SEQ ID NO: 7393 - protein, 11 aa, synthetic construct
  REGION 1..11: note = short peptide
GPFGPRPLPPP

SEQ ID NO: 7394 - protein, 10 aa, synthetic construct
  REGION 1..10: note = short peptide
RVRVPGPVHL

SEQ ID NO: 7395 - protein, 9 aa, synthetic construct
  REGION 1..9: note = short peptide
RVYKFCSKL

SEQ ID NO: 7396 - protein, 15 aa, synthetic construct
  REGION 1..15: note = short peptide
GITIDISLWKFETSK

SEQ ID NO: 7397 - protein, 10 aa, synthetic construct
  REGION 1..10: note = short peptide
GITCPIVPGI

SEQ ID NO: 7398 - protein, 10 aa, synthetic construct
  REGION 1..10: note = short peptide
RYCKNKPYPK

SEQ ID NO: 7399 - protein, 10 aa, synthetic construct
  REGION 1..10: note = short peptide
KYFQGDLQLF

SEQ ID NO: 7400 - protein, 9 aa, synthetic construct
  REGION 1..9: note = short peptide
RYLEKPMEI

SEQ ID NO: 7401 - protein, 15 aa, synthetic construct
  REGION 1..15: note = short peptide
GIHETTFNSIMKSDV

SEQ ID NO: 7402 - protein, 9 aa, synthetic construct
  REGION 1..9: note = short peptide
RVQEGNESY

SEQ ID NO: 7403 - protein, 11 aa, synthetic construct
  REGION 1..11: note = short peptide
RVNREIVSGMK

SEQ ID NO: 7404 - protein, 8 aa, synthetic construct
  REGION 1..8: note = short peptide
GNSGGVDI

SEQ ID NO: 7405 - protein, 9 aa, synthetic construct
  REGION 1..9: note = short peptide
RVIAIRPIR

SEQ ID NO: 7406 - protein, 9 aa, synthetic construct
  REGION 1..9: note = short peptide
GLPGPPGVP

SEQ ID NO: 7407 - protein, 11 aa, synthetic construct
  REGION 1..11: note = short peptide
GLFDVHSVLRV

SEQ ID NO: 7408 - protein, 8 aa, synthetic construct
  REGION 1..8: note = short peptide
KPYQKVGL

SEQ ID NO: 7409 - protein, 10 aa, synthetic construct
  REGION 1..10: note = short peptide
RVLNKLGGVK

SEQ ID NO: 7410 - protein, 12 aa, synthetic construct
  REGION 1..12: note = short peptide
RRMFGGPGTASR

SEQ ID NO: 7411 - protein, 10 aa, synthetic construct
  REGION 1..10: note = short peptide
GTATPPLTSR

SEQ ID NO: 7412 - protein, 11 aa, synthetic construct
  REGION 1..11: note = short peptide
RQYDNEKKWDL

SEQ ID NO: 7413 - protein, 10 aa, synthetic construct
  REGION 1..10: note = short peptide
GTAEPGGSMK

SEQ ID NO: 7414 - protein, 14 aa, synthetic construct
  REGION 1..14: note = short peptide
GSYSQHQSSYGPMK

SEQ ID NO: 7415 - protein, 10 aa, synthetic construct
  REGION 1..10: note = short peptide
GSYRDSYDSY

SEQ ID NO: 7416 - protein, 9 aa, synthetic construct
  REGION 1..9: note = short peptide
RRAVPLALA

SEQ ID NO: 7417 - protein, 11 aa, synthetic construct
  REGION 1..11: note = short peptide
GTIRPMYGVTA

SEQ ID NO: 7418 - protein, 13 aa, synthetic construct
  REGION 1..13: note = short peptide
GTPASGRKRTPVK

SEQ ID NO: 7419 - protein, 10 aa, synthetic construct
  REGION 1..10: note = short peptide
RPWLEGRHTL

SEQ ID NO: 7420 - protein, 12 aa, synthetic construct
  REGION 1..12: note = short peptide
GTMTGGGSKVMK

SEQ ID NO: 7421 - protein, 15 aa, synthetic construct
  REGION 1..15: note = short peptide
RQATDDASLLIVNRY

SEQ ID NO: 7422 - protein, 11 aa, synthetic construct
  REGION 1..11: note = short peptide
RQDHPSSMGVY

SEQ ID NO: 7423 - protein, 11 aa, synthetic construct
  REGION 1..11: note = short peptide
RQHSTFTGRFG

SEQ ID NO: 7424 - protein, 15 aa, synthetic construct
  REGION 1..15: note = short peptide
GSLTGIGTGALGLPA

SEQ ID NO: 7425 - protein, 11 aa, synthetic construct
  REGION 1..11: note = short peptide
RRMGPPVGGHR

SEQ ID NO: 7426 - protein, 9 aa, synthetic construct
  REGION 1..9: note = short peptide
KYLGFPYYL

SEQ ID NO: 7427 - protein, 9 aa, synthetic construct
  REGION 1..9: note = short peptide
RSIGDRILR

SEQ ID NO: 7428 - protein, 9 aa, synthetic construct
  REGION 1..9: note = short peptide
RSISTPTCL

SEQ ID NO: 7429 - protein, 15 aa, synthetic construct
  REGION 1..15: note = short peptide
RSLYASSPGGVYATR

SEQ ID NO: 7430 - protein, 9 aa, synthetic construct
  REGION 1..9: note = short peptide
RSNLIAHNR

SEQ ID NO: 7431 - protein, 9 aa, synthetic construct
  REGION 1..9: note = short peptide
GQNQLGIRI

SEQ ID NO: 7432 - protein, 9 aa, synthetic construct
  REGION 1..9: note = short peptide
GQMPHSHQY

SEQ ID NO: 7433 - protein, 10 aa, synthetic construct
  REGION 1..10: note = short peptide
GQGWATAHWT

SEQ ID NO: 7434 - protein, 13 aa, synthetic construct
  REGION 1..13: note = short peptide
GRFGSRGGPGGGF

SEQ ID NO: 7435 - protein, 10 aa, synthetic construct
  REGION 1..10: note = short peptide
RSGTPAVENK

SEQ ID NO: 7436 - protein, 11 aa, synthetic construct
  REGION 1..11: note = short peptide
GRLKGPLLNKF

SEQ ID NO: 7437 - protein, 10 aa, synthetic construct
  REGION 1..10: note = short peptide
RRQFAKFLQR

SEQ ID NO: 7438 - protein, 13 aa, synthetic construct
  REGION 1..13: note = short peptide
GSIDHISIRQLQL

SEQ ID NO: 7439 - protein, 9 aa, synthetic construct
  REGION 1..9: note = short peptide
GSGRPGFAF

SEQ ID NO: 7440 - protein, 8 aa, synthetic construct
  REGION 1..8: note = short peptide
RRSRPRER

SEQ ID NO: 7441 - protein, 10 aa, synthetic construct
  REGION 1..10: note = short peptide
GSDDGTVRIW

SEQ ID NO: 7442 - protein, 14 aa, synthetic construct
  REGION 1..14: note = short peptide
RRWNGSTAITDDTL

SEQ ID NO: 7443 - protein, 11 aa, synthetic construct
  REGION 1..11: note = short peptide
KPRMSLPENLK

SEQ ID NO: 7444 - protein, 10 aa, synthetic construct
  REGION 1..10: note = short peptide
RSAPPAGAAP

SEQ ID NO: 7445 - protein, 8 aa, synthetic construct
  REGION 1..8: note = short peptide
RSASPKRR

SEQ ID NO: 7446 - protein, 10 aa, synthetic construct
  REGION 1..10: note = short peptide
GRSQVSTPRF

SEQ ID NO: 7447 - protein, 11 aa, synthetic construct
  REGION 1..11: note = short peptide
YEFDTKDLVCL

SEQ ID NO: 7448 - protein, 15 aa, synthetic construct
  REGION 1..15: note = short peptide
VKAQYEDIAQKSKAE

SEQ ID NO: 7449 - protein, 11 aa, synthetic construct
  REGION 1..11: note = short peptide
VIGDCGGAMER

SEQ ID NO: 7450 - protein, 10 aa, synthetic construct
  REGION 1..10: note = short peptide
SARGFPRHCY

SEQ ID NO: 7451 - protein, 9 aa, synthetic construct
  REGION 1..9: note = short peptide
SAGCPHVTL

SEQ ID NO: 7452 - protein, 9 aa, synthetic construct
  REGION 1..9: note = short peptide
SEVCPPPGY

SEQ ID NO: 7453 - protein, 9 aa, synthetic construct
  REGION 1..9: note = short peptide
SCYKLGAYY

SEQ ID NO: 7454 - protein, 10 aa, synthetic construct
  REGION 1..10: note = short peptide
RVKEVEEMCK

SEQ ID NO: 7455 - protein, 9 aa, synthetic construct
  REGION 1..9: note = short peptide
YHTDCNVLL

SEQ ID NO: 7456 - protein, 9 aa, synthetic construct
  REGION 1..9: note = short peptide
VPQLQVPVL

SEQ ID NO: 7457 - protein, 9 aa, synthetic construct
  REGION 1..9: note = short peptide
SAVSKTVCK

SEQ ID NO: 7458 - protein, 11 aa, synthetic construct
  REGION 1..11: note = short peptide
VYPPPVANGMY

SEQ ID NO: 7459 - protein, 9 aa, synthetic construct
  REGION 1..9: note = short peptide
SAVDLSTCF

SEQ ID NO: 7460 - protein, 9 aa, synthetic construct
  REGION 1..9: note = short peptide
RVKKICEGF

SEQ ID NO: 7461 - protein, 8 aa, synthetic construct
  REGION 1..8: note = short peptide
VRGPAHCL

SEQ ID NO: 7462 - protein, 9 aa, synthetic construct
  REGION 1..9: note = short peptide
RVYKFCSKL

SEQ ID NO: 7463 - protein, 9 aa, synthetic construct
  REGION 1..9: note = short peptide
VSREDQCSY

SEQ ID NO: 7464 - protein, 9 aa, synthetic construct
  REGION 1..9: note = short peptide
SEKRNTCVL

SEQ ID NO: 7465 - protein, 10 aa, synthetic construct
  REGION 1..10: note = short peptide
RVYGGCLCYG

SEQ ID NO: 7466 - protein, 10 aa, synthetic construct
  REGION 1..10: note = short peptide
SEGCVQGVVL

SEQ ID NO: 7467 - protein, 9 aa, synthetic construct
  REGION 1..9: note = short peptide
SEGKCFSVL

SEQ ID NO: 7468 - protein, 9 aa, synthetic construct
  REGION 1..9: note = short peptide
SEGKCFSVL

SEQ ID NO: 7469 - protein, 13 aa, synthetic construct
  REGION 1..13: note = short peptide
YYIAHNVADCLHL

SEQ ID NO: 7470 - protein, 10 aa, synthetic construct
  REGION 1..10: note = short peptide
SEESGICHKY

SEQ ID NO: 7471 - protein, 9 aa, synthetic construct
  REGION 1..9: note = short peptide
VNSLRPKGL

SEQ ID NO: 7472 - protein, 11 aa, synthetic construct
  REGION 1..11: note = short peptide
RYLESARCYAL

SEQ ID NO: 7473 - protein, 9 aa, synthetic construct
  REGION 1..9: note = short peptide
VLINVNPCA

SEQ ID NO: 7474 - protein, 9 aa, synthetic construct
  REGION 1..9: note = short peptide
VVDSCSMLY

SEQ ID NO: 7475 - protein, 11 aa, synthetic construct
  REGION 1..11: note = short peptide
VVEPQQQLCQK

SEQ ID NO: 7476 - protein, 11 aa, synthetic construct
  REGION 1..11: note = short peptide
VPAQVHVNGDA

SEQ ID NO: 7477 - protein, 12 aa, synthetic construct
  REGION 1..12: note = short peptide
VPGSNPARYEFL

SEQ ID NO: 7478 - protein, 9 aa, synthetic construct
  REGION 1..9: note = short peptide
SDSCREVTV

SEQ ID NO: 7479 - protein, 9 aa, synthetic construct
  REGION 1..9: note = short peptide
VPICKDNVV

SEQ ID NO: 7480 - protein, 13 aa, synthetic construct
  REGION 1..13: note = short peptide
YCKNKPYPKSRFC

SEQ ID NO: 7481 - protein, 10 aa, synthetic construct
  REGION 1..10: note = short peptide
VLCSTNVSHY

SEQ ID NO: 7482 - protein, 12 aa, synthetic construct
  REGION 1..12: note = short peptide
VPFCPMVGSEVY

SEQ ID NO: 7483 - protein, 9 aa, synthetic construct
  REGION 1..9: note = short peptide
VVCGDPVTK

SEQ ID NO: 7484 - protein, 9 aa, synthetic construct
  REGION 1..9: note = short peptide
VLNKDLHFY

SEQ ID NO: 7485 - protein, 9 aa, synthetic construct
  REGION 1..9: note = short peptide
VVCTRIYEK

SEQ ID NO: 7486 - protein, 8 aa, synthetic construct
  REGION 1..8: note = short peptide
VPCLKILL

SEQ ID NO: 7487 - protein, 8 aa, synthetic construct
  REGION 1..8: note = short peptide
VLKQKCLL

SEQ ID NO: 7488 - protein, 10 aa, synthetic construct
  REGION 1..10: note = short peptide
TNAVIFSQKI

SEQ ID NO: 7489 - protein, 8 aa, synthetic construct
  REGION 1..8: note = short peptide
TKKIKQCL

SEQ ID NO: 7490 - protein, 9 aa, synthetic construct
  REGION 1..9: note = short peptide
SPSDTLLCF

SEQ ID NO: 7491 - protein, 9 aa, synthetic construct
  REGION 1..9: note = short peptide
TLADHICQI

SEQ ID NO: 7492 - protein, 9 aa, synthetic construct
  REGION 1..9: note = short peptide
SPRCPLRGA

SEQ ID NO: 7493 - protein, 10 aa, synthetic construct
  REGION 1..10: note = short peptide
SPRCGSPTAM

SEQ ID NO: 7494 - protein, 9 aa, synthetic construct
  REGION 1..9: note = short peptide
TLCEALLMV

SEQ ID NO: 7495 - protein, 9 aa, synthetic construct
  REGION 1..9: note = short peptide
SPNGASFVC

SEQ ID NO: 7496 - protein, 9 aa, synthetic construct
  REGION 1..9: note = short peptide
TLDPGTAHR

SEQ ID NO: 7497 - protein, 11 aa, synthetic construct
  REGION 1..11: note = short peptide
TINGHNCEVKK

SEQ ID NO: 7498 - protein, 11 aa, synthetic construct
  REGION 1..11: note = short peptide
TILCLGPSDLL

SEQ ID NO: 7499 - protein, 9 aa, synthetic construct
  REGION 1..9: note = short peptide
THAHHLRCL

SEQ ID NO: 7500 - protein, 9 aa, synthetic construct
  REGION 1..9: note = short peptide
YPVCVSKVV

SEQ ID NO: 7501 - protein, 9 aa, synthetic construct
  REGION 1..9: note = short peptide
THCDEVLRL

SEQ ID NO: 7502 - protein, 11 aa, synthetic construct
  REGION 1..11: note = short peptide
THEACPVRALL

SEQ ID NO: 7503 - protein, 10 aa, synthetic construct
  REGION 1..10: note = short peptide
SQVDAKYCQI

SEQ ID NO: 7504 - protein, 12 aa, synthetic construct
  REGION 1..12: note = short peptide
TIISDPTCEITQ

SEQ ID NO: 7505 - protein, 9 aa, synthetic construct
  REGION 1..9: note = short peptide
YPYSCFKTV

SEQ ID NO: 7506 - protein, 11 aa, synthetic construct
  REGION 1..11: note = short peptide
SQNGSCRQVQY

SEQ ID NO: 7507 - protein, 10 aa, synthetic construct
  REGION 1..10: note = short peptide
THVCIQQTAL

SEQ ID NO: 7508 - protein, 10 aa, synthetic construct
  REGION 1..10: note = short peptide
TICRVTGGMK

SEQ ID NO: 7509 - protein, 10 aa, synthetic construct
  REGION 1..10: note = short peptide
TLENVKNICK

SEQ ID NO: 7510 - protein, 10 aa, synthetic construct
  REGION 1..10: note = short peptide
SPFCLSPISA

SEQ ID NO: 7511 - protein, 9 aa, synthetic construct
  REGION 1..9: note = short peptide
TMHDYAPLV

SEQ ID NO: 7512 - protein, 10 aa, synthetic construct
  REGION 1..10: note = short peptide
TMSGVTTCLR

SEQ ID NO: 7513 - protein, 9 aa, synthetic construct
  REGION 1..9: note = short peptide
TLIMCLHDV

SEQ ID NO: 7514 - protein, 9 aa, synthetic construct
  REGION 1..9: note = short peptide
SPMRDAPCL

SEQ ID NO: 7515 - protein, 10 aa, synthetic construct
  REGION 1..10: note = short peptide
SPIPLLLSCA

SEQ ID NO: 7516 - protein, 8 aa, synthetic construct
  REGION 1..8: note = short peptide
YNNVKACL

SEQ ID NO: 7517 - protein, 10 aa, synthetic construct
  REGION 1..10: note = short peptide
YQHDAACRVI

SEQ ID NO: 7518 - protein, 11 aa, synthetic construct
  REGION 1..11: note = short peptide
TLMGQCQDLRK

SEQ ID NO: 7519 - protein, 12 aa, synthetic construct
  REGION 1..12: note = short peptide
SSVLRCGKKKVW

SEQ ID NO: 7520 - protein, 10 aa, synthetic construct
  REGION 1..10: note = short peptide
STCNSKLTLK

SEQ ID NO: 7521 - protein, 10 aa, synthetic construct
  REGION 1..10: note = short peptide
STCNRLFTSK

SEQ ID NO: 7522 - protein, 10 aa, synthetic construct
  REGION 1..10: note = short peptide
STCDFGNLKR

SEQ ID NO: 7523 - protein, 11 aa, synthetic construct
  REGION 1..11: note = short peptide
STAGDIACAFR

SEQ ID NO: 7524 - protein, 10 aa, synthetic construct
  REGION 1..10: note = short peptide
SYLDRCLHKF

SEQ ID NO: 7525 - protein, 11 aa, synthetic construct
  REGION 1..11: note = short peptide
TAACSRLLVQY

SEQ ID NO: 7526 - protein, 11 aa, synthetic construct
  REGION 1..11: note = short peptide
TAFDCATSALR

SEQ ID NO: 7527 - protein, 10 aa, synthetic construct
  REGION 1..10: note = short peptide
SSNSAQGSDV

SEQ ID NO: 7528 - protein, 13 aa, synthetic construct
  REGION 1..13: note = short peptide
SVYDSVLQKCSHR

SEQ ID NO: 7529 - protein, 10 aa, synthetic construct
  REGION 1..10: note = short peptide
STRNPDGCLK

SEQ ID NO: 7530 - protein, 9 aa, synthetic construct
  REGION 1..9: note = short peptide
SVCESAFNR

SEQ ID NO: 7531 - protein, 9 aa, synthetic construct
  REGION 1..9: note = short peptide
SVCTNPSDK

SEQ ID NO: 7532 - protein, 9 aa, synthetic construct
  REGION 1..9: note = short peptide
SVGSQVSCR

SEQ ID NO: 7533 - protein, 10 aa, synthetic construct
  REGION 1..10: note = short peptide
SVHYCPATKK

SEQ ID NO: 7534 - protein, 10 aa, synthetic construct
  REGION 1..10: note = short peptide
SVIEVCGHNF

SEQ ID NO: 7535 - protein, 11 aa, synthetic construct
  REGION 1..11: note = short peptide
STFEQCQEWLK

SEQ ID NO: 7536 - protein, 9 aa, synthetic construct
  REGION 1..9: note = short peptide
SVTCHVKHY

SEQ ID NO: 7537 - protein, 12 aa, synthetic construct
  REGION 1..12: note = short peptide
TGVSIIIPQGAI

SEQ ID NO: 7538 - protein, 11 aa, synthetic construct
  REGION 1..11: note = short peptide
TEVVLIKNVCL

SEQ ID NO: 7539 - protein, 10 aa, synthetic construct
  REGION 1..10: note = short peptide
YPFPKDCSQA

SEQ ID NO: 7540 - protein, 10 aa, synthetic construct
  REGION 1..10: note = short peptide
TGTKDTVCSG

SEQ ID NO: 7541 - protein, 10 aa, synthetic construct
  REGION 1..10: note = short peptide
SRFHADSVCK

SEQ ID NO: 7542 - protein, 14 aa, synthetic construct
  REGION 1..14: note = short peptide
TGTKDTVCSGVTSA

SEQ ID NO: 7543 - protein, 9 aa, synthetic construct
  REGION 1..9: note = short peptide
TAQRSLEPG

SEQ ID NO: 7544 - protein, 9 aa, synthetic construct
  REGION 1..9: note = short peptide
SSLRSVCFK

SEQ ID NO: 7545 - protein, 9 aa, synthetic construct
  REGION 1..9: note = short peptide
TASPEASCL

SEQ ID NO: 7546 - protein, 11 aa, synthetic construct
  REGION 1..11: note = short peptide
TASRIDICLRK

SEQ ID NO: 7547 - protein, 9 aa, synthetic construct
  REGION 1..9: note = short peptide
YPSTPEPCA

SEQ ID NO: 7548 - protein, 9 aa, synthetic construct
  REGION 1..9: note = short peptide
SSKELQQYL

SEQ ID NO: 7549 - protein, 10 aa, synthetic construct
  REGION 1..10: note = short peptide
TAVESGCIHY

SEQ ID NO: 7550 - protein, 8 aa, synthetic construct
  REGION 1..8: note = short peptide
TCLGIHLY

SEQ ID NO: 7551 - protein, 10 aa, synthetic construct
  REGION 1..10: note = short peptide
TDPLLQTDEL

SEQ ID NO: 7552 - protein, 11 aa, synthetic construct
  REGION 1..11: note = short peptide
YPTVPCPLHVF

SEQ ID NO: 7553 - protein, 10 aa, synthetic construct
  REGION 1..10: note = short peptide
TEAEFACHSY

SEQ ID NO: 7554 - protein, 10 aa, synthetic construct
  REGION 1..10: note = short peptide
SSCPADLTQK

SEQ ID NO: 7555 - protein, 8 aa, synthetic construct
  REGION 1..8: note = short peptide
TNFKIPLL

SEQ ID NO: 7556 - protein, 9 aa, synthetic construct
  REGION 1..9: note = short peptide
YLDCVIKEV

SEQ ID NO: 7557 - protein, 11 aa, synthetic construct
  REGION 1..11: note = short peptide
TVSGSCLIHER

SEQ ID NO: 7558 - protein, 9 aa, synthetic construct
  REGION 1..9: note = short peptide
SICEAPRHK

SEQ ID NO: 7559 - protein, 11 aa, synthetic construct
  REGION 1..11: note = short peptide
TVVNNGTVAIW

SEQ ID NO: 7560 - protein, 9 aa, synthetic construct
  REGION 1..9: note = short peptide
SHSPANCRI

SEQ ID NO: 7561 - protein, 9 aa, synthetic construct
  REGION 1..9: note = short peptide
YLAGCLVHA

SEQ ID NO: 7562 - protein, 9 aa, synthetic construct
  REGION 1..9: note = short peptide
TYIQCIAAI

SEQ ID NO: 7563 - protein, 9 aa, synthetic construct
  REGION 1..9: note = short peptide
SICKILAMK

SEQ ID NO: 7564 - protein, 9 aa, synthetic construct
  REGION 1..9: note = short peptide
TVNGISLCL

SEQ ID NO: 7565 - protein, 12 aa, synthetic construct
  REGION 1..12: note = short peptide
TVLANGGSPPSL

SEQ ID NO: 7566 - protein, 10 aa, synthetic construct
  REGION 1..10: note = short peptide
SITPLALPCK

SEQ ID NO: 7567 - protein, 12 aa, synthetic construct
  REGION 1..12: note = short peptide
YSRVSPQPMISR

SEQ ID NO: 7568 - protein, 12 aa, synthetic construct
  REGION 1..12: note = short peptide
TVIDVNIDCAVK

SEQ ID NO: 7569 - protein, 8 aa, synthetic construct
  REGION 1..8: note = short peptide
SGCNIARY

SEQ ID NO: 7570 - protein, 9 aa, synthetic construct
  REGION 1..9: note = short peptide
VEPISCHAW

SEQ ID NO: 7571 - protein, 9 aa, synthetic construct
  REGION 1..9: note = short peptide
VEQCRQLGL

SEQ ID NO: 7572 - protein, 9 aa, synthetic construct
  REGION 1..9: note = short peptide
SFHNFTLCY

SEQ ID NO: 7573 - protein, 9 aa, synthetic construct
  REGION 1..9: note = short peptide
VEVGRVKCY

SEQ ID NO: 7574 - protein, 9 aa, synthetic construct
  REGION 1..9: note = short peptide
SFCQTLLQY

SEQ ID NO: 7575 - protein, 13 aa, synthetic construct
  REGION 1..13: note = short peptide
SFCPTVNLDKLWT

SEQ ID NO: 7576 - protein, 9 aa, synthetic construct
  REGION 1..9: note = short peptide
VFISVCTAL

SEQ ID NO: 7577 - protein, 10 aa, synthetic construct
  REGION 1..10: note = short peptide
YTEQQRCDGY

SEQ ID NO: 7578 - protein, 10 aa, synthetic construct
  REGION 1..10: note = short peptide
SEVLQDSCFL

SEQ ID NO: 7579 - protein, 9 aa, synthetic construct
  REGION 1..9: note = short peptide
SHLDRCLLL

SEQ ID NO: 7580 - protein, 9 aa, synthetic construct
  REGION 1..9: note = short peptide
VANTDNCSL

SEQ ID NO: 7581 - protein, 11 aa, synthetic construct
  REGION 1..11: note = short peptide
YIKDCVSPSEY

SEQ ID NO: 7582 - protein, 8 aa, synthetic construct
  REGION 1..8: note = short peptide
VAHPPHAP

SEQ ID NO: 7583 - protein, 10 aa, synthetic construct
  REGION 1..10: note = short peptide
YTDCIPQLMK

SEQ ID NO: 7584 - protein, 9 aa, synthetic construct
  REGION 1..9: note = short peptide
VEAALKNCP

SEQ ID NO: 7585 - protein, 10 aa, synthetic construct
  REGION 1..10: note = short peptide
VECPIRGTAA

SEQ ID NO: 7586 - protein, 9 aa, synthetic construct
  REGION 1..9: note = short peptide
VELCKKDSL

SEQ ID NO: 7587 - protein, 9 aa, synthetic construct
  REGION 1..9: note = short peptide
SLSNCSIGK

SEQ ID NO: 7588 - protein, 8 aa, synthetic construct
  REGION 1..8: note = short peptide
SLRLKSCF

SEQ ID NO: 7589 - protein, 8 aa, synthetic construct
  REGION 1..8: note = short peptide
TPYILCSI

SEQ ID NO: 7590 - protein, 9 aa, synthetic construct
  REGION 1..9: note = short peptide
TQDHQKLCY

SEQ ID NO: 7591 - protein, 9 aa, synthetic construct
  REGION 1..9: note = short peptide
YLSTCKDSK

SEQ ID NO: 7592 - protein, 10 aa, synthetic construct
  REGION 1..10: note = short peptide
TQLTMNVPFQ

SEQ ID NO: 7593 - protein, 8 aa, synthetic construct
  REGION 1..8: note = short peptide
TPCSKAVM

SEQ ID NO: 7594 - protein, 9 aa, synthetic construct
  REGION 1..9: note = short peptide
SMHDCVSVV

SEQ ID NO: 7595 - protein, 11 aa, synthetic construct
  REGION 1..11: note = short peptide
TPICPHSLSFR

SEQ ID NO: 7596 - protein, 8 aa, synthetic construct
  REGION 1..8: note = short peptide
TPIEGKNM

SEQ ID NO: 7597 - protein, 11 aa, synthetic construct
  REGION 1..11: note = short peptide
TPLPWCPHLVA

SEQ ID NO: 7598 - protein, 8 aa, synthetic construct
  REGION 1..8: note = short peptide
TSNGHEVF

SEQ ID NO: 7599 - protein, 15 aa, synthetic construct
  REGION 1..15: note = short peptide
TTKEAPDGCPDHVLR

SEQ ID NO: 7600 - protein, 9 aa, synthetic construct
  REGION 1..9: note = short peptide
TTTCNHALY

SEQ ID NO: 7601 - protein, 9 aa, synthetic construct
  REGION 1..9: note = short peptide
TTVCSITKR

SEQ ID NO: 7602 - protein, 12 aa, synthetic construct
  REGION 1..12: note = short peptide
YSDLGNHTTCRY

SEQ ID NO: 7603 - protein, 10 aa, synthetic construct
  REGION 1..10: note = short peptide
TVCSNINETK

SEQ ID NO: 7604 - protein, 11 aa, synthetic construct
  REGION 1..11: note = short peptide
TVFQCDPGYAL

SEQ ID NO: 7605 - protein, 9 aa, synthetic construct
  REGION 1..9: note = short peptide
SVCGELFRY

SEQ ID NO: 7606 - protein, 15 aa, synthetic construct
  REGION 1..15: note = short peptide
TSAPGNARFGQGSGP

SEQ ID NO: 7607 - protein, 9 aa, synthetic construct
  REGION 1..9: note = short peptide
SLIDFVVTC

SEQ ID NO: 7608 - protein, 9 aa, synthetic construct
  REGION 1..9: note = short peptide
TRCGCVTML

SEQ ID NO: 7609 - protein, 9 aa, synthetic construct
  REGION 1..9: note = short peptide
TRDSLFFCL

SEQ ID NO: 7610 - protein, 10 aa, synthetic construct
  REGION 1..10: note = short peptide
SLGTGNRCVK

SEQ ID NO: 7611 - protein, 12 aa, synthetic construct
  REGION 1..12: note = short peptide
YSDEPCIGQEYQ

SEQ ID NO: 7612 - protein, 10 aa, synthetic construct
  REGION 1..10: note = short peptide
TRGDCLAFQM

SEQ ID NO: 7613 - protein, 9 aa, synthetic construct
  REGION 1..9: note = short peptide
TRWCNEHLK

SEQ ID NO: 7614 - protein, 9 aa, synthetic construct
  REGION 1..9: note = short peptide
YSDERGCLY

SEQ ID NO: 7615 - protein, 9 aa, synthetic construct
  REGION 1..9: note = short peptide
TRNVVRYCL

SEQ ID NO: 7616 - protein, 12 aa, synthetic construct
  REGION 1..12: note = short peptide
GQIGNGPSHVSM

SEQ ID NO: 7617 - protein, 11 aa, synthetic construct
  REGION 1..11: note = short peptide
GQLTQAVQQCI

SEQ ID NO: 7618 - protein, 9 aa, synthetic construct
  REGION 1..9: note = short peptide
GQVIRIICI

SEQ ID NO: 7619 - protein, 9 aa, synthetic construct
  REGION 1..9: note = short peptide
GQVIRVICI

SEQ ID NO: 7620 - protein, 9 aa, synthetic construct
  REGION 1..9: note = short peptide
GQYKKTQCV

SEQ ID NO: 7621 - protein, 14 aa, synthetic construct
  REGION 1..14: note = short peptide
GRFIPCSPFSDYVY

SEQ ID NO: 7622 - protein, 13 aa, synthetic construct
  REGION 1..13: note = short peptide
GRKKTATAVAHCK

SEQ ID NO: 7623 - protein, 9 aa, synthetic construct
  REGION 1..9: note = short peptide
GRLGPLLCL

SEQ ID NO: 7624 - protein, 9 aa, synthetic construct
  REGION 1..9: note = short peptide
GRLKASCQR

SEQ ID NO: 7625 - protein, 9 aa, synthetic construct
  REGION 1..9: note = short peptide
GRVYISKCY

SEQ ID NO: 7626 - protein, 9 aa, synthetic construct
  REGION 1..9: note = short peptide
GRYCIFNNK

SEQ ID NO: 7627 - protein, 11 aa, synthetic construct
  REGION 1..11: note = short peptide
GSNGHSKYRLK

SEQ ID NO: 7628 - protein, 9 aa, synthetic construct
  REGION 1..9: note = short peptide
GTCSKAFIK

SEQ ID NO: 7629 - protein, 9 aa, synthetic construct
  REGION 1..9: note = short peptide
GTLHFCGFK

SEQ ID NO: 7630 - protein, 12 aa, synthetic construct
  REGION 1..12: note = short peptide
GTNCTRFGIAAK

SEQ ID NO: 7631 - protein, 9 aa, synthetic construct
  REGION 1..9: note = short peptide
GQKVNGASV

SEQ ID NO: 7632 - protein, 12 aa, synthetic construct
  REGION 1..12: note = short peptide
GQIGNGPSHVSM

SEQ ID NO: 7633 - protein, 10 aa, synthetic construct
  REGION 1..10: note = short peptide
GQIARACAIF

SEQ ID NO: 7634 - protein, 9 aa, synthetic construct
  REGION 1..9: note = short peptide
GLASAAGCK

SEQ ID NO: 7635 - protein, 14 aa, synthetic construct
  REGION 1..14: note = short peptide
GLHQTLDQTLNELN

SEQ ID NO: 7636 - protein, 13 aa, synthetic construct
  REGION 1..13: note = short peptide
GMYNQRYHCPVPK

SEQ ID NO: 7637 - protein, 9 aa, synthetic construct
  REGION 1..9: note = short peptide
GPCGLRVAV

SEQ ID NO: 7638 - protein, 9 aa, synthetic construct
  REGION 1..9: note = short peptide
GPDTKRVCL

SEQ ID NO: 7639 - protein, 10 aa, synthetic construct
  REGION 1..10: note = short peptide
GPGDLQGPPI

SEQ ID NO: 7640 - protein, 13 aa, synthetic construct
  REGION 1..13: note = short peptide
GPHQQSHQESARD

SEQ ID NO: 7641 - protein, 13 aa, synthetic construct
  REGION 1..13: note = short peptide
GPHQQSHQESARD

SEQ ID NO: 7642 - protein, 11 aa, synthetic construct
  REGION 1..11: note = short peptide
GPRGWLVLCVL

SEQ ID NO: 7643 - protein, 9 aa, synthetic construct
  REGION 1..9: note = short peptide
GQCPMRVQK

SEQ ID NO: 7644 - protein, 10 aa, synthetic construct
  REGION 1..10: note = short peptide
GVACLREIAK

SEQ ID NO: 7645 - protein, 9 aa, synthetic construct
  REGION 1..9: note = short peptide
GVCHIFASF

SEQ ID NO: 7646 - protein, 13 aa, synthetic construct
  REGION 1..13: note = short peptide
HGSPVDICTAKPR

SEQ ID NO: 7647 - protein, 9 aa, synthetic construct
  REGION 1..9: note = short peptide
HGVLKTLCL

SEQ ID NO: 7648 - protein, 10 aa, synthetic construct
  REGION 1..10: note = short peptide
HHARNNQSLF

SEQ ID NO: 7649 - protein, 9 aa, synthetic construct
  REGION 1..9: note = short peptide
HHARSICHL

SEQ ID NO: 7650 - protein, 9 aa, synthetic construct
  REGION 1..9: note = short peptide
HHLCKVKAL

SEQ ID NO: 7651 - protein, 9 aa, synthetic construct
  REGION 1..9: note = short peptide
HHQYIAKCL

SEQ ID NO: 7652 - protein, 10 aa, synthetic construct
  REGION 1..10: note = short peptide
HFGNCFALAY

SEQ ID NO: 7653 - protein, 11 aa, synthetic construct
  REGION 1..11: note = short peptide
GVPCFLGGMAR

SEQ ID NO: 7654 - protein, 9 aa, synthetic construct
  REGION 1..9: note = short peptide
HAGCPLPAM

SEQ ID NO: 7655 - protein, 9 aa, synthetic construct
  REGION 1..9: note = short peptide
HAISCVEMY

SEQ ID NO: 7656 - protein, 10 aa, synthetic construct
  REGION 1..10: note = short peptide
HEASDFPCRV

SEQ ID NO: 7657 - protein, 10 aa, synthetic construct
  REGION 1..10: note = short peptide
HEICLQDIQL

SEQ ID NO: 7658 - protein, 9 aa, synthetic construct
  REGION 1..9: note = short peptide
FQDESCFLF

SEQ ID NO: 7659 - protein, 8 aa, synthetic construct
  REGION 1..8: note = short peptide
FTCKVPGL

SEQ ID NO: 7660 - protein, 12 aa, synthetic construct
  REGION 1..12: note = short peptide
FTELENCLLGQY

SEQ ID NO: 7661 - protein, 9 aa, synthetic construct
  REGION 1..9: note = short peptide
FTKCKNFAL

SEQ ID NO: 7662 - protein, 12 aa, synthetic construct
  REGION 1..12: note = short peptide
FTYQSLQGCPRK

SEQ ID NO: 7663 - protein, 11 aa, synthetic construct
  REGION 1..11: note = short peptide
FVAALDKACGR

SEQ ID NO: 7664 - protein, 12 aa, synthetic construct
  REGION 1..12: note = short peptide
FVQCPDGELQKR

SEQ ID NO: 7665 - protein, 10 aa, synthetic construct
  REGION 1..10: note = short peptide
FWCGITPQGY

SEQ ID NO: 7666 - protein, 11 aa, synthetic construct
  REGION 1..11: note = short peptide
FYIPEGCIQRW

SEQ ID NO: 7667 - protein, 10 aa, synthetic construct
  REGION 1..10: note = short peptide
FPHISQCEEL

SEQ ID NO: 7668 - protein, 10 aa, synthetic construct
  REGION 1..10: note = short peptide
FPDPNKLHCF

SEQ ID NO: 7669 - protein, 10 aa, synthetic construct
  REGION 1..10: note = short peptide
FLEDVLNEIQ

SEQ ID NO: 7670 - protein, 8 aa, synthetic construct
  REGION 1..8: note = short peptide
FLHEKNCM

SEQ ID NO: 7671 - protein, 10 aa, synthetic construct
  REGION 1..10: note = short peptide
FLVLWLQLCW

SEQ ID NO: 7672 - protein, 13 aa, synthetic construct
  REGION 1..13: note = short peptide
GCPEVSGPTLLAK

SEQ ID NO: 7673 - protein, 10 aa, synthetic construct
  REGION 1..10: note = short peptide
GESDMTFICV

SEQ ID NO: 7674 - protein, 10 aa, synthetic construct
  REGION 1..10: note = short peptide
GETETRLECL

SEQ ID NO: 7675 - protein, 11 aa, synthetic construct
  REGION 1..11: note = short peptide
GEVCIKGTNVF

SEQ ID NO: 7676 - protein, 10 aa, synthetic construct
  REGION 1..10: note = short peptide
GEVFSEHSCL

SEQ ID NO: 7677 - protein, 9 aa, synthetic construct
  REGION 1..9: note = short peptide
GEWVGLCKI

SEQ ID NO: 7678 - protein, 9 aa, synthetic construct
  REGION 1..9: note = short peptide
GEYCPEVKL

SEQ ID NO: 7679 - protein, 10 aa, synthetic construct
  REGION 1..10: note = short peptide
GEYIPGACSA

SEQ ID NO: 7680 - protein, 9 aa, synthetic construct
  REGION 1..9: note = short peptide
GEYKCVVQH

SEQ ID NO: 7681 - protein, 9 aa, synthetic construct
  REGION 1..9: note = short peptide
GHCDGQQAL

SEQ ID NO: 7682 - protein, 9 aa, synthetic construct
  REGION 1..9: note = short peptide
GHHAKIVCL

SEQ ID NO: 7683 - protein, 9 aa, synthetic construct
  REGION 1..9: note = short peptide
GEAASCQLL

SEQ ID NO: 7684 - protein, 9 aa, synthetic construct
  REGION 1..9: note = short peptide
GECERNVSF

SEQ ID NO: 7685 - protein, 11 aa, synthetic construct
  REGION 1..11: note = short peptide
GEFHPDGCLQI

SEQ ID NO: 7686 - protein, 9 aa, synthetic construct
  REGION 1..9: note = short peptide
GEGCIALRL

SEQ ID NO: 7687 - protein, 11 aa, synthetic construct
  REGION 1..11: note = short peptide
GEICEEGLHVL

SEQ ID NO: 7688 - protein, 11 aa, synthetic construct
  REGION 1..11: note = short peptide
GEIEELQQCLL

SEQ ID NO: 7689 - protein, 9 aa, synthetic construct
  REGION 1..9: note = short peptide
GEIGGHCKL

SEQ ID NO: 7690 - protein, 11 aa, synthetic construct
  REGION 1..11: note = short peptide
GEIICKCGQAW

SEQ ID NO: 7691 - protein, 9 aa, synthetic construct
  REGION 1..9: note = short peptide
GEKPFQCTF

SEQ ID NO: 7692 - protein, 9 aa, synthetic construct
  REGION 1..9: note = short peptide
GEKPFQCTF

SEQ ID NO: 7693 - protein, 9 aa, synthetic construct
  REGION 1..9: note = short peptide
HLTQAVCTV

SEQ ID NO: 7694 - protein, 9 aa, synthetic construct
  REGION 1..9: note = short peptide
IYTCVLHLL

SEQ ID NO: 7695 - protein, 9 aa, synthetic construct
  REGION 1..9: note = short peptide
IYTPISCKI

SEQ ID NO: 7696 - protein, 9 aa, synthetic construct
  REGION 1..9: note = short peptide
KACDRPVAK

SEQ ID NO: 7697 - protein, 9 aa, synthetic construct
  REGION 1..9: note = short peptide
KACGVSVKK

SEQ ID NO: 7698 - protein, 9 aa, synthetic construct
  REGION 1..9: note = short peptide
KAFICPSSF

SEQ ID NO: 7699 - protein, 10 aa, synthetic construct
  REGION 1..10: note = short peptide
KANLEGANLK

SEQ ID NO: 7700 - protein, 9 aa, synthetic construct
  REGION 1..9: note = short peptide
IYSEVTCFF

SEQ ID NO: 7701 - protein, 9 aa, synthetic construct
  REGION 1..9: note = short peptide
IYPAICTNI

SEQ ID NO: 7702 - protein, 9 aa, synthetic construct
  REGION 1..9: note = short peptide
IYNPIIYCF

SEQ ID NO: 7703 - protein, 11 aa, synthetic construct
  REGION 1..11: note = short peptide
IQKCGDMAVAF

SEQ ID NO: 7704 - protein, 10 aa, synthetic construct
  REGION 1..10: note = short peptide
ISSNGGSTYY

SEQ ID NO: 7705 - protein, 9 aa, synthetic construct
  REGION 1..9: note = short peptide
IYLLNPCHL

SEQ ID NO: 7706 - protein, 11 aa, synthetic construct
  REGION 1..11: note = short peptide
ITCSGDALPKK

SEQ ID NO: 7707 - protein, 15 aa, synthetic construct
  REGION 1..15: note = short peptide
ITSACHKYFEKAGLK

SEQ ID NO: 7708 - protein, 9 aa, synthetic construct
  REGION 1..9: note = short peptide
KELGRMCQL

SEQ ID NO: 7709 - protein, 8 aa, synthetic construct
  REGION 1..8: note = short peptide
KENIKCFF

SEQ ID NO: 7710 - protein, 10 aa, synthetic construct
  REGION 1..10: note = short peptide
KEQSGQKCFL

SEQ ID NO: 7711 - protein, 9 aa, synthetic construct
  REGION 1..9: note = short peptide
KDSPVFCRF

SEQ ID NO: 7712 - protein, 9 aa, synthetic construct
  REGION 1..9: note = short peptide
KDLCRVLYF

SEQ ID NO: 7713 - protein, 9 aa, synthetic construct
  REGION 1..9: note = short peptide
KDRIHCVAF

SEQ ID NO: 7714 - protein, 15 aa, synthetic construct
  REGION 1..15: note = short peptide
KEIEATGCNGDAAFL

SEQ ID NO: 7715 - protein, 8 aa, synthetic construct
  REGION 1..8: note = short peptide
HQSNGNQL

SEQ ID NO: 7716 - protein, 8 aa, synthetic construct
  REGION 1..8: note = short peptide
HRCIVRAL

SEQ ID NO: 7717 - protein, 10 aa, synthetic construct
  REGION 1..10: note = short peptide
HSACATAVAR

SEQ ID NO: 7718 - protein, 9 aa, synthetic construct
  REGION 1..9: note = short peptide
HSCPESVKK

SEQ ID NO: 7719 - protein, 9 aa, synthetic construct
  REGION 1..9: note = short peptide
HSGCIQTQR

SEQ ID NO: 7720 - protein, 13 aa, synthetic construct
  REGION 1..13: note = short peptide
HVCEQRDVKGLYK

SEQ ID NO: 7721 - protein, 10 aa, synthetic construct
  REGION 1..10: note = short peptide
HVSEPSTCVY

SEQ ID NO: 7722 - protein, 10 aa, synthetic construct
  REGION 1..10: note = short peptide
HQFEQLSGSI

SEQ ID NO: 7723 - protein, 10 aa, synthetic construct
  REGION 1..10: note = short peptide
HPYSECDFKL

SEQ ID NO: 7724 - protein, 9 aa, synthetic construct
  REGION 1..9: note = short peptide
HPNSVHICA

SEQ ID NO: 7725 - protein, 9 aa, synthetic construct
  REGION 1..9: note = short peptide
HPPSAHPPP

SEQ ID NO: 7726 - protein, 9 aa, synthetic construct
  REGION 1..9: note = short peptide
HVVCGMLGF

SEQ ID NO: 7727 - protein, 9 aa, synthetic construct
  REGION 1..9: note = short peptide
IPQNLPCSV

SEQ ID NO: 7728 - protein, 8 aa, synthetic construct
  REGION 1..8: note = short peptide
INKKIYKI

SEQ ID NO: 7729 - protein, 10 aa, synthetic construct
  REGION 1..10: note = short peptide
IPQGTFICEY

SEQ ID NO: 7730 - protein, 11 aa, synthetic construct
  REGION 1..11: note = short peptide
ILSQEGSLCSV

SEQ ID NO: 7731 - protein, 9 aa, synthetic construct
  REGION 1..9: note = short peptide
IHCDMVITY

SEQ ID NO: 7732 - protein, 15 aa, synthetic construct
  REGION 1..15: note = short peptide
IDRIQILPRGNGCPR

SEQ ID NO: 7733 - protein, 9 aa, synthetic construct
  REGION 1..9: note = short peptide
IESSVPCQL

SEQ ID NO: 7734 - protein, 9 aa, synthetic construct
  REGION 1..9: note = short peptide
IHALCEEHF

SEQ ID NO: 7735 - protein, 10 aa, synthetic construct
  REGION 1..10: note = short peptide
IICLPTGSGK

SEQ ID NO: 7736 - protein, 9 aa, synthetic construct
  REGION 1..9: note = short peptide
IIMCEPIQH

SEQ ID NO: 7737 - protein, 11 aa, synthetic construct
  REGION 1..11: note = short peptide
FGQHGTGSGQY

SEQ ID NO: 7738 - protein, 13 aa, synthetic construct
  REGION 1..13: note = short peptide
ASMHVSDHSGFHY

SEQ ID NO: 7739 - protein, 9 aa, synthetic construct
  REGION 1..9: note = short peptide
ASSDRCSAL

SEQ ID NO: 7740 - protein, 9 aa, synthetic construct
  REGION 1..9: note = short peptide
ATANKQVCK

SEQ ID NO: 7741 - protein, 10 aa, synthetic construct
  REGION 1..10: note = short peptide
ATQGATEIVK

SEQ ID NO: 7742 - protein, 11 aa, synthetic construct
  REGION 1..11: note = short peptide
ATTDSLSCIVK

SEQ ID NO: 7743 - protein, 11 aa, synthetic construct
  REGION 1..11: note = short peptide
AVCDASKVVTV

SEQ ID NO: 7744 - protein, 13 aa, synthetic construct
  REGION 1..13: note = short peptide
AVLGAVVTAMMCR

SEQ ID NO: 7745 - protein, 11 aa, synthetic construct
  REGION 1..11: note = short peptide
AVNPRNPGELC

SEQ ID NO: 7746 - protein, 10 aa, synthetic construct
  REGION 1..10: note = short peptide
ASLHGRIYCK

SEQ ID NO: 7747 - protein, 9 aa, synthetic construct
  REGION 1..9: note = short peptide
FFIHYPYCY

SEQ ID NO: 7748 - protein, 9 aa, synthetic construct
  REGION 1..9: note = short peptide
APRLALKCL

SEQ ID NO: 7749 - protein, 10 aa, synthetic construct
  REGION 1..10: note = short peptide
ARDKTLQKKC

SEQ ID NO: 7750 - protein, 9 aa, synthetic construct
  REGION 1..9: note = short peptide
ARFGCDIRA

SEQ ID NO: 7751 - protein, 11 aa, synthetic construct
  REGION 1..11: note = short peptide
ARLKTFPCKRF

SEQ ID NO: 7752 - protein, 9 aa, synthetic construct
  REGION 1..9: note = short peptide
ARNALAKHI

SEQ ID NO: 7753 - protein, 10 aa, synthetic construct
  REGION 1..10: note = short peptide
ASAPTTPCQK

SEQ ID NO: 7754 - protein, 10 aa, synthetic construct
  REGION 1..10: note = short peptide
ASCGVPPFQK

SEQ ID NO: 7755 - protein, 9 aa, synthetic construct
  REGION 1..9: note = short peptide
ASCKVPVKK

SEQ ID NO: 7756 - protein, 9 aa, synthetic construct
  REGION 1..9: note = short peptide
ASCSDDRTV

SEQ ID NO: 7757 - protein, 13 aa, synthetic construct
  REGION 1..13: note = short peptide
ASDAGLYRCDVMY

SEQ ID NO: 7758 - protein, 9 aa, synthetic construct
  REGION 1..9: note = short peptide
ASGGPLTCK

SEQ ID NO: 7759 - protein, 12 aa, synthetic construct
  REGION 1..12: note = short peptide
AVYLSTCKDSKK

SEQ ID NO: 7760 - protein, 9 aa, synthetic construct
  REGION 1..9: note = short peptide
CNIDTGLTF

SEQ ID NO: 7761 - protein, 8 aa, synthetic construct
  REGION 1..8: note = short peptide
CNSDLVIR

SEQ ID NO: 7762 - protein, 9 aa, synthetic construct
  REGION 1..9: note = short peptide
CPAVRLITL

SEQ ID NO: 7763 - protein, 9 aa, synthetic construct
  REGION 1..9: note = short peptide
CPDPRPLEL

SEQ ID NO: 7764 - protein, 9 aa, synthetic construct
  REGION 1..9: note = short peptide
CPHKKSATL

SEQ ID NO: 7765 - protein, 9 aa, synthetic construct
  REGION 1..9: note = short peptide
CPIAVTHFL

SEQ ID NO: 7766 - protein, 9 aa, synthetic construct
  REGION 1..9: note = short peptide
CPLLRTLDL

SEQ ID NO: 7767 - protein, 11 aa, synthetic construct
  REGION 1..11: note = short peptide
CPNPSTPSKAA

SEQ ID NO: 7768 - protein, 9 aa, synthetic construct
  REGION 1..9: note = short peptide
CPNSKAPVL

SEQ ID NO: 7769 - protein, 11 aa, synthetic construct
  REGION 1..11: note = short peptide
CPNVPSRPQAM

SEQ ID NO: 7770 - protein, 9 aa, synthetic construct
  REGION 1..9: note = short peptide
CPYHSDRQL

SEQ ID NO: 7771 - protein, 9 aa, synthetic construct
  REGION 1..9: note = short peptide
CRHNYQLEL

SEQ ID NO: 7772 - protein, 8 aa, synthetic construct
  REGION 1..8: note = short peptide
CSIKDNSF

SEQ ID NO: 7773 - protein, 9 aa, synthetic construct
  REGION 1..9: note = short peptide
CSSSEILRM

SEQ ID NO: 7774 - protein, 11 aa, synthetic construct
  REGION 1..11: note = short peptide
CVANGEVRNGY

SEQ ID NO: 7775 - protein, 9 aa, synthetic construct
  REGION 1..9: note = short peptide
CVDGLFKEV

SEQ ID NO: 7776 - protein, 9 aa, synthetic construct
  REGION 1..9: note = short peptide
CVINNQEMG

SEQ ID NO: 7777 - protein, 11 aa, synthetic construct
  REGION 1..11: note = short peptide
CVLNEGMPIYR

SEQ ID NO: 7778 - protein, 9 aa, synthetic construct
  REGION 1..9: note = short peptide
CLSKPGVYK

SEQ ID NO: 7779 - protein, 9 aa, synthetic construct
  REGION 1..9: note = short peptide
CLSDYTLEY

SEQ ID NO: 7780 - protein, 9 aa, synthetic construct
  REGION 1..9: note = short peptide
AYMCPFMQF

SEQ ID NO: 7781 - protein, 9 aa, synthetic construct
  REGION 1..9: note = short peptide
CAGADRLQT

SEQ ID NO: 7782 - protein, 9 aa, synthetic construct
  REGION 1..9: note = short peptide
CAPKSKPVL

SEQ ID NO: 7783 - protein, 8 aa, synthetic construct
  REGION 1..8: note = short peptide
CAVTRDSL

SEQ ID NO: 7784 - protein, 8 aa, synthetic construct
  REGION 1..8: note = short peptide
CDNRKVSF

SEQ ID NO: 7785 - protein, 9 aa, synthetic construct
  REGION 1..9: note = short peptide
CDWLRATGF

SEQ ID NO: 7786 - protein, 9 aa, synthetic construct
  REGION 1..9: note = short peptide
CLDIHNMSV

SEQ ID NO: 7787 - protein, 9 aa, synthetic construct
  REGION 1..9: note = short peptide
CEIKEKTGL

SEQ ID NO: 7788 - protein, 8 aa, synthetic construct
  REGION 1..8: note = short peptide
CEPVFVRY

SEQ ID NO: 7789 - protein, 15 aa, synthetic construct
  REGION 1..15: note = short peptide
CFRQYAKDIGFIKLD

SEQ ID NO: 7790 - protein, 9 aa, synthetic construct
  REGION 1..9: note = short peptide
CHDATPFIF

SEQ ID NO: 7791 - protein, 13 aa, synthetic construct
  REGION 1..13: note = short peptide
CLDDSYASGEGLK

SEQ ID NO: 7792 - protein, 9 aa, synthetic construct
  REGION 1..9: note = short peptide
CLDIHNMSV

SEQ ID NO: 7793 - protein, 10 aa, synthetic construct
  REGION 1..10: note = short peptide
AEILHSACGL

SEQ ID NO: 7794 - protein, 9 aa, synthetic construct
  REGION 1..9: note = short peptide
AEKCFDHAA

SEQ ID NO: 7795 - protein, 9 aa, synthetic construct
  REGION 1..9: note = short peptide
AELTCLNEA

SEQ ID NO: 7796 - protein, 9 aa, synthetic construct
  REGION 1..9: note = short peptide
AENVCKASA

SEQ ID NO: 7797 - protein, 10 aa, synthetic construct
  REGION 1..10: note = short peptide
AESCIPARIL

SEQ ID NO: 7798 - protein, 9 aa, synthetic construct
  REGION 1..9: note = short peptide
AETCPAHTY

SEQ ID NO: 7799 - protein, 9 aa, synthetic construct
  REGION 1..9: note = short peptide
AEYQVCLAA

SEQ ID NO: 7800 - protein, 11 aa, synthetic construct
  REGION 1..11: note = short peptide
AEHSFSNGAAL

SEQ ID NO: 7801 - protein, 14 aa, synthetic construct
  REGION 1..14: note = short peptide
AADGDFKIKCVAFD

SEQ ID NO: 7802 - protein, 10 aa, synthetic construct
  REGION 1..10: note = short peptide
AEAPGGAGCA

SEQ ID NO: 7803 - protein, 9 aa, synthetic construct
  REGION 1..9: note = short peptide
AECAGKLFL

SEQ ID NO: 7804 - protein, 9 aa, synthetic construct
  REGION 1..9: note = short peptide
AECGKVFRL

SEQ ID NO: 7805 - protein, 10 aa, synthetic construct
  REGION 1..10: note = short peptide
AECNAVRQAL

SEQ ID NO: 7806 - protein, 9 aa, synthetic construct
  REGION 1..9: note = short peptide
ANNCPALRK

SEQ ID NO: 7807 - protein, 9 aa, synthetic construct
  REGION 1..9: note = short peptide
ANNCPALRK

SEQ ID NO: 7808 - protein, 10 aa, synthetic construct
  REGION 1..10: note = short peptide
APACHRFKIL

SEQ ID NO: 7809 - protein, 10 aa, synthetic construct
  REGION 1..10: note = short peptide
APACHRFKIL

SEQ ID NO: 7810 - protein, 9 aa, synthetic construct
  REGION 1..9: note = short peptide
APDCHGPVL

SEQ ID NO: 7811 - protein, 10 aa, synthetic construct
  REGION 1..10: note = short peptide
APHSHRDVCA

SEQ ID NO: 7812 - protein, 11 aa, synthetic construct
  REGION 1..11: note = short peptide
APICLLYKNLA

SEQ ID NO: 7813 - protein, 9 aa, synthetic construct
  REGION 1..9: note = short peptide
APKVPNNCL

SEQ ID NO: 7814 - protein, 9 aa, synthetic construct
  REGION 1..9: note = short peptide
AHDGTCNNL

SEQ ID NO: 7815 - protein, 10 aa, synthetic construct
  REGION 1..10: note = short peptide
AHQEEIAGAF

SEQ ID NO: 7816 - protein, 14 aa, synthetic construct
  REGION 1..14: note = short peptide
AHSQTNRANLGTLR

SEQ ID NO: 7817 - protein, 11 aa, synthetic construct
  REGION 1..11: note = short peptide
ALYDICFRTLK

SEQ ID NO: 7818 - protein, 9 aa, synthetic construct
  REGION 1..9: note = short peptide
ALCGVPVLV

SEQ ID NO: 7819 - protein, 11 aa, synthetic construct
  REGION 1..11: note = short peptide
ALFGDVKFVCV

SEQ ID NO: 7820 - protein, 9 aa, synthetic construct
  REGION 1..9: note = short peptide
ALRITKHCY

SEQ ID NO: 7821 - protein, 11 aa, synthetic construct
  REGION 1..11: note = short peptide
CVQTGVTGVTK

SEQ ID NO: 7822 - protein, 9 aa, synthetic construct
  REGION 1..9: note = short peptide
CVVGKISKH

SEQ ID NO: 7823 - protein, 9 aa, synthetic construct
  REGION 1..9: note = short peptide
EHQSCTINM

SEQ ID NO: 7824 - protein, 9 aa, synthetic construct
  REGION 1..9: note = short peptide
EHTCVLHSI

SEQ ID NO: 7825 - protein, 9 aa, synthetic construct
  REGION 1..9: note = short peptide
ELICKTHQL

SEQ ID NO: 7826 - protein, 9 aa, synthetic construct
  REGION 1..9: note = short peptide
ELKRCKSEL

SEQ ID NO: 7827 - protein, 9 aa, synthetic construct
  REGION 1..9: note = short peptide
ELLQRCESL

SEQ ID NO: 7828 - protein, 9 aa, synthetic construct
  REGION 1..9: note = short peptide
ELREKLCSI

SEQ ID NO: 7829 - protein, 9 aa, synthetic construct
  REGION 1..9: note = short peptide
EHLDLPCAL

SEQ ID NO: 7830 - protein, 9 aa, synthetic construct
  REGION 1..9: note = short peptide
EHHSNIFCL

SEQ ID NO: 7831 - protein, 10 aa, synthetic construct
  REGION 1..10: note = short peptide
EELKSMQRCY

SEQ ID NO: 7832 - protein, 8 aa, synthetic construct
  REGION 1..8: note = short peptide
EEVLSCLY

SEQ ID NO: 7833 - protein, 9 aa, synthetic construct
  REGION 1..9: note = short peptide
EGKEKPVCG

SEQ ID NO: 7834 - protein, 9 aa, synthetic construct
  REGION 1..9: note = short peptide
EHCGCYTLL

SEQ ID NO: 7835 - protein, 10 aa, synthetic construct
  REGION 1..10: note = short peptide
EHCRKVNEYL

SEQ ID NO: 7836 - protein, 11 aa, synthetic construct
  REGION 1..11: note = short peptide
EMVSLKDYCTR

SEQ ID NO: 7837 - protein, 14 aa, synthetic construct
  REGION 1..14: note = short peptide
EVIQTTDDTKVLCR

SEQ ID NO: 7838 - protein, 10 aa, synthetic construct
  REGION 1..10: note = short peptide
EVKGVCTEAG

SEQ ID NO: 7839 - protein, 12 aa, synthetic construct
  REGION 1..12: note = short peptide
EVPSVPTNGMAK

SEQ ID NO: 7840 - protein, 9 aa, synthetic construct
  REGION 1..9: note = short peptide
EVSSMPACK

SEQ ID NO: 7841 - protein, 15 aa, synthetic construct
  REGION 1..15: note = short peptide
EVYEKPVQVPCGHVF

SEQ ID NO: 7842 - protein, 9 aa, synthetic construct
  REGION 1..9: note = short peptide
FDCATSALR

SEQ ID NO: 7843 - protein, 9 aa, synthetic construct
  REGION 1..9: note = short peptide
FFIHYPYCY

SEQ ID NO: 7844 - protein, 10 aa, synthetic construct
  REGION 1..10: note = short peptide
EVFRFASACM

SEQ ID NO: 7845 - protein, 10 aa, synthetic construct
  REGION 1..10: note = short peptide
EVFRFASACM

SEQ ID NO: 7846 - protein, 13 aa, synthetic construct
  REGION 1..13: note = short peptide
ETIGVGSYSECKR

SEQ ID NO: 7847 - protein, 9 aa, synthetic construct
  REGION 1..9: note = short peptide
ERCPRDTRI

SEQ ID NO: 7848 - protein, 10 aa, synthetic construct
  REGION 1..10: note = short peptide
EVFRFASACM

SEQ ID NO: 7849 - protein, 10 aa, synthetic construct
  REGION 1..10: note = short peptide
EVAGIKFWCY

SEQ ID NO: 7850 - protein, 11 aa, synthetic construct
  REGION 1..11: note = short peptide
EVATELPCHHY

SEQ ID NO: 7851 - protein, 9 aa, synthetic construct
  REGION 1..9: note = short peptide
CYILYLRTL

SEQ ID NO: 7852 - protein, 10 aa, synthetic construct
  REGION 1..10: note = short peptide
DEISTCHQLL

SEQ ID NO: 7853 - protein, 9 aa, synthetic construct
  REGION 1..9: note = short peptide
DGRKFSCHI

SEQ ID NO: 7854 - protein, 8 aa, synthetic construct
  REGION 1..8: note = short peptide
DHADSCVV

SEQ ID NO: 7855 - protein, 8 aa, synthetic construct
  REGION 1..8: note = short peptide
DHAGSACL

SEQ ID NO: 7856 - protein, 9 aa, synthetic construct
  REGION 1..9: note = short peptide
DHFSDCEFL

SEQ ID NO: 7857 - protein, 9 aa, synthetic construct
  REGION 1..9: note = short peptide
DHFSDCEFL

SEQ ID NO: 7858 - protein, 13 aa, synthetic construct
  REGION 1..13: note = short peptide
DIAQKSKAEAESL

SEQ ID NO: 7859 - protein, 9 aa, synthetic construct
  REGION 1..9: note = short peptide
DIQDVAVCR

SEQ ID NO: 7860 - protein, 9 aa, synthetic construct
  REGION 1..9: note = short peptide
DISIPCHYK

SEQ ID NO: 7861 - protein, 10 aa, synthetic construct
  REGION 1..10: note = short peptide
DLIDSCIQSF

SEQ ID NO: 7862 - protein, 9 aa, synthetic construct
  REGION 1..9: note = short peptide
DEISTCHQL

SEQ ID NO: 7863 - protein, 11 aa, synthetic construct
  REGION 1..11: note = short peptide
CYNPHTDHWSF

SEQ ID NO: 7864 - protein, 8 aa, synthetic construct
  REGION 1..8: note = short peptide
DALIVHCV

SEQ ID NO: 7865 - protein, 8 aa, synthetic construct
  REGION 1..8: note = short peptide
DALMAGCI

SEQ ID NO: 7866 - protein, 9 aa, synthetic construct
  REGION 1..9: note = short peptide
DAMCPILEF

SEQ ID NO: 7867 - protein, 9 aa, synthetic construct
  REGION 1..9: note = short peptide
DAMQVCRNV

SEQ ID NO: 7868 - protein, 9 aa, synthetic construct
  REGION 1..9: note = short peptide
DATADYICK

SEQ ID NO: 7869 - protein, 12 aa, synthetic construct
  REGION 1..12: note = short peptide
DCQKAMQGLTGR

SEQ ID NO: 7870 - protein, 12 aa, synthetic construct
  REGION 1..12: note = short peptide
DDCVFGGQRLTL

SEQ ID NO: 7871 - protein, 10 aa, synthetic construct
  REGION 1..10: note = short peptide
DEFKFGCTSL

SEQ ID NO: 7872 - protein, 9 aa, synthetic construct
  REGION 1..9: note = short peptide
DEHVIQHCF

SEQ ID NO: 7873 - protein, 9 aa, synthetic construct
  REGION 1..9: note = short peptide
DLKKLTCQV

SEQ ID NO: 7874 - protein, 12 aa, synthetic construct
  REGION 1..12: note = short peptide
DTVSLHQQCSHR

SEQ ID NO: 7875 - protein, 9 aa, synthetic construct
  REGION 1..9: note = short peptide
DVGQIFSCR

SEQ ID NO: 7876 - protein, 9 aa, synthetic construct
  REGION 1..9: note = short peptide
DVIETCMAY

SEQ ID NO: 7877 - protein, 9 aa, synthetic construct
  REGION 1..9: note = short peptide
DVIFSVMCY

SEQ ID NO: 7878 - protein, 9 aa, synthetic construct
  REGION 1..9: note = short peptide
DVITCFANF

SEQ ID NO: 7879 - protein, 10 aa, synthetic construct
  REGION 1..10: note = short peptide
DVSNQTSCRL

SEQ ID NO: 7880 - protein, 13 aa, synthetic construct
  REGION 1..13: note = short peptide
DVVPMTAENFRCL

SEQ ID NO: 7881 - protein, 10 aa, synthetic construct
  REGION 1..10: note = short peptide
EAADEICKRL

SEQ ID NO: 7882 - protein, 9 aa, synthetic construct
  REGION 1..9: note = short peptide
EAWDLGVCR

SEQ ID NO: 7883 - protein, 10 aa, synthetic construct
  REGION 1..10: note = short peptide
EECELAKQLY

SEQ ID NO: 7884 - protein, 10 aa, synthetic construct
  REGION 1..10: note = short peptide
DTTFSSAFCR

SEQ ID NO: 7885 - protein, 10 aa, synthetic construct
  REGION 1..10: note = short peptide
DTSDANVVCR

SEQ ID NO: 7886 - protein, 9 aa, synthetic construct
  REGION 1..9: note = short peptide
DTRDYICEF

SEQ ID NO: 7887 - protein, 13 aa, synthetic construct
  REGION 1..13: note = short peptide
DMVPGKPMCVESF

SEQ ID NO: 7888 - protein, 8 aa, synthetic construct
  REGION 1..8: note = short peptide
DPFLHCVI

SEQ ID NO: 7889 - protein, 9 aa, synthetic construct
  REGION 1..9: note = short peptide
DPVAVASCF

SEQ ID NO: 7890 - protein, 10 aa, synthetic construct
  REGION 1..10: note = short peptide
DQITCISKGW

SEQ ID NO: 7891 - protein, 10 aa, synthetic construct
  REGION 1..10: note = short peptide
DTNDANVVCR

SEQ ID NO: 7892 - protein, 9 aa, synthetic construct
  REGION 1..9: note = short peptide
DQTCQKTHW

SEQ ID NO: 7893 - protein, 10 aa, synthetic construct
  REGION 1..10: note = short peptide
DSISITTSCY

SEQ ID NO: 7894 - protein, 10 aa, synthetic construct
  REGION 1..10: note = short peptide
KESTGCHTQL

SEQ ID NO: 7895 - protein, 10 aa, synthetic construct
  REGION 1..10: note = short peptide
NQSEAGSHTW

SEQ ID NO: 7896 - protein, 10 aa, synthetic construct
  REGION 1..10: note = short peptide
NQSEAGSHTW

SEQ ID NO: 7897 - protein, 9 aa, synthetic construct
  REGION 1..9: note = short peptide
NQTVTVIER

SEQ ID NO: 7898 - protein, 9 aa, synthetic construct
  REGION 1..9: note = short peptide
NRTDSACSL

SEQ ID NO: 7899 - protein, 11 aa, synthetic construct
  REGION 1..11: note = short peptide
NRWKQSVELCK

SEQ ID NO: 7900 - protein, 11 aa, synthetic construct
  REGION 1..11: note = short peptide
NSSHFEHIIYR

SEQ ID NO: 7901 - protein, 11 aa, synthetic construct
  REGION 1..11: note = short peptide
NTCPYVHNITR

SEQ ID NO: 7902 - protein, 10 aa, synthetic construct
  REGION 1..10: note = short peptide
NTFSPEGRLF

SEQ ID NO: 7903 - protein, 10 aa, synthetic construct
  REGION 1..10: note = short peptide
NVAKFIINSY

SEQ ID NO: 7904 - protein, 8 aa, synthetic construct
  REGION 1..8: note = short peptide
NEVWFCKF

SEQ ID NO: 7905 - protein, 9 aa, synthetic construct
  REGION 1..9: note = short peptide
NHFDQLCQI

SEQ ID NO: 7906 - protein, 9 aa, synthetic construct
  REGION 1..9: note = short peptide
NHNRCGYKF

SEQ ID NO: 7907 - protein, 10 aa, synthetic construct
  REGION 1..10: note = short peptide
NITQVGSVTK

SEQ ID NO: 7908 - protein, 9 aa, synthetic construct
  REGION 1..9: note = short peptide
NLQSHILSF

SEQ ID NO: 7909 - protein, 9 aa, synthetic construct
  REGION 1..9: note = short peptide
NPILLPCEA

SEQ ID NO: 7910 - protein, 9 aa, synthetic construct
  REGION 1..9: note = short peptide
NVAKSIAKF

SEQ ID NO: 7911 - protein, 12 aa, synthetic construct
  REGION 1..12: note = short peptide
NVINWENVTERY

SEQ ID NO: 7912 - protein, 10 aa, synthetic construct
  REGION 1..10: note = short peptide
NVVNLIEICR

SEQ ID NO: 7913 - protein, 12 aa, synthetic construct
  REGION 1..12: note = short peptide
PTDLILCVPHLY

SEQ ID NO: 7914 - protein, 10 aa, synthetic construct
  REGION 1..10: note = short peptide
QAAAGHGNEF

SEQ ID NO: 7915 - protein, 11 aa, synthetic construct
  REGION 1..11: note = short peptide
QAAECHPPVGR

SEQ ID NO: 7916 - protein, 9 aa, synthetic construct
  REGION 1..9: note = short peptide
QAVKNDQCY

SEQ ID NO: 7917 - protein, 9 aa, synthetic construct
  REGION 1..9: note = short peptide
PNTGSIFNI

SEQ ID NO: 7918 - protein, 10 aa, synthetic construct
  REGION 1..10: note = short peptide
NVVNLIEICR

SEQ ID NO: 7919 - protein, 12 aa, synthetic construct
  REGION 1..12: note = short peptide
PEGQPGPWGQAL

SEQ ID NO: 7920 - protein, 11 aa, synthetic construct
  REGION 1..11: note = short peptide
PGLCLNAVALY

SEQ ID NO: 7921 - protein, 14 aa, synthetic construct
  REGION 1..14: note = short peptide
NCPYVPNANQADHD

SEQ ID NO: 7922 - protein, 12 aa, synthetic construct
  REGION 1..12: note = short peptide
MPRPENCPEELY

SEQ ID NO: 7923 - protein, 13 aa, synthetic construct
  REGION 1..13: note = short peptide
MPIPVGVAGPLCL

SEQ ID NO: 7924 - protein, 9 aa, synthetic construct
  REGION 1..9: note = short peptide
MGLPRLVCA

SEQ ID NO: 7925 - protein, 9 aa, synthetic construct
  REGION 1..9: note = short peptide
MHQVESENL

SEQ ID NO: 7926 - protein, 11 aa, synthetic construct
  REGION 1..11: note = short peptide
MIDCQPPAMSY

SEQ ID NO: 7927 - protein, 15 aa, synthetic construct
  REGION 1..15: note = short peptide
NCPFHYNPAQYDYDR

SEQ ID NO: 7928 - protein, 13 aa, synthetic construct
  REGION 1..13: note = short peptide
MPVIFGKSSCSEF

SEQ ID NO: 7929 - protein, 11 aa, synthetic construct
  REGION 1..11: note = short peptide
MVKCDPRHGKY

SEQ ID NO: 7930 - protein, 9 aa, synthetic construct
  REGION 1..9: note = short peptide
NAACASLLK

SEQ ID NO: 7931 - protein, 9 aa, synthetic construct
  REGION 1..9: note = short peptide
NALGVVACY

SEQ ID NO: 7932 - protein, 9 aa, synthetic construct
  REGION 1..9: note = short peptide
NALRNFACL

SEQ ID NO: 7933 - protein, 15 aa, synthetic construct
  REGION 1..15: note = short peptide
NCPFHYNPAQYDYDR

SEQ ID NO: 7934 - protein, 9 aa, synthetic construct
  REGION 1..9: note = short peptide
MQYCTNISK

SEQ ID NO: 7935 - protein, 10 aa, synthetic construct
  REGION 1..10: note = short peptide
MRMKCTVTNR

SEQ ID NO: 7936 - protein, 9 aa, synthetic construct
  REGION 1..9: note = short peptide
MSCFPWAEK

SEQ ID NO: 7937 - protein, 12 aa, synthetic construct
  REGION 1..12: note = short peptide
MTSDTSGICNLR

SEQ ID NO: 7938 - protein, 12 aa, synthetic construct
  REGION 1..12: note = short peptide
MTACGLARDAPR

SEQ ID NO: 7939 - protein, 9 aa, synthetic construct
  REGION 1..9: note = short peptide
RMLEPLPCW

SEQ ID NO: 7940 - protein, 9 aa, synthetic construct
  REGION 1..9: note = short peptide
RNIEKKLAF

SEQ ID NO: 7941 - protein, 8 aa, synthetic construct
  REGION 1..8: note = short peptide
RNLKKIFQ

SEQ ID NO: 7942 - protein, 9 aa, synthetic construct
  REGION 1..9: note = short peptide
RPGRPCTRL

SEQ ID NO: 7943 - protein, 10 aa, synthetic construct
  REGION 1..10: note = short peptide
RPKDCDVLTA

SEQ ID NO: 7944 - protein, 9 aa, synthetic construct
  REGION 1..9: note = short peptide
RLYCESHAK

SEQ ID NO: 7945 - protein, 15 aa, synthetic construct
  REGION 1..15: note = short peptide
RLWDCETGKQLALLK

SEQ ID NO: 7946 - protein, 11 aa, synthetic construct
  REGION 1..11: note = short peptide
RLLAKECRLYY

SEQ ID NO: 7947 - protein, 9 aa, synthetic construct
  REGION 1..9: note = short peptide
RLCGKPKSH

SEQ ID NO: 7948 - protein, 10 aa, synthetic construct
  REGION 1..10: note = short peptide
RLFRPLAKRC

SEQ ID NO: 7949 - protein, 9 aa, synthetic construct
  REGION 1..9: note = short peptide
RLHFRQLCY

SEQ ID NO: 7950 - protein, 9 aa, synthetic construct
  REGION 1..9: note = short peptide
RLIPDGCGV

SEQ ID NO: 7951 - protein, 13 aa, synthetic construct
  REGION 1..13: note = short peptide
RLIPDGCGVKYIP

SEQ ID NO: 7952 - protein, 9 aa, synthetic construct
  REGION 1..9: note = short peptide
RLKKCVDKI

SEQ ID NO: 7953 - protein, 9 aa, synthetic construct
  REGION 1..9: note = short peptide
RLKKLCQHI

SEQ ID NO: 7954 - protein, 9 aa, synthetic construct
  REGION 1..9: note = short peptide
RLQEKLVCK

SEQ ID NO: 7955 - protein, 9 aa, synthetic construct
  REGION 1..9: note = short peptide
RLLQASCLL

SEQ ID NO: 7956 - protein, 10 aa, synthetic construct
  REGION 1..10: note = short peptide
RLCDRLQKGK

SEQ ID NO: 7957 - protein, 10 aa, synthetic construct
  REGION 1..10: note = short peptide
RRNPACLHRL

SEQ ID NO: 7958 - protein, 9 aa, synthetic construct
  REGION 1..9: note = short peptide
RRQLTGKSR

SEQ ID NO: 7959 - protein, 9 aa, synthetic construct
  REGION 1..9: note = short peptide
RRQSCSVAR

SEQ ID NO: 7960 - protein, 11 aa, synthetic construct
  REGION 1..11: note = short peptide
RTFCDSSSLLF

SEQ ID NO: 7961 - protein, 10 aa, synthetic construct
  REGION 1..10: note = short peptide
RTFDGKLKCR

SEQ ID NO: 7962 - protein, 11 aa, synthetic construct
  REGION 1..11: note = short peptide
RTIDGSKTCTI

SEQ ID NO: 7963 - protein, 11 aa, synthetic construct
  REGION 1..11: note = short peptide
RVAPPGKKCAF

SEQ ID NO: 7964 - protein, 9 aa, synthetic construct
  REGION 1..9: note = short peptide
RRFMQPVCL

SEQ ID NO: 7965 - protein, 9 aa, synthetic construct
  REGION 1..9: note = short peptide
RRALLERCL

SEQ ID NO: 7966 - protein, 10 aa, synthetic construct
  REGION 1..10: note = short peptide
RPRYAIGVCA

SEQ ID NO: 7967 - protein, 9 aa, synthetic construct
  REGION 1..9: note = short peptide
RQEVGSHGR

SEQ ID NO: 7968 - protein, 9 aa, synthetic construct
  REGION 1..9: note = short peptide
RQIDKIQCA

SEQ ID NO: 7969 - protein, 9 aa, synthetic construct
  REGION 1..9: note = short peptide
RQKVFEICV

SEQ ID NO: 7970 - protein, 9 aa, synthetic construct
  REGION 1..9: note = short peptide
RQNRVCTTV

SEQ ID NO: 7971 - protein, 8 aa, synthetic construct
  REGION 1..8: note = short peptide
RQNVPRKV

SEQ ID NO: 7972 - protein, 14 aa, synthetic construct
  REGION 1..14: note = short peptide
RQVPGSNPARYEFL

SEQ ID NO: 7973 - protein, 15 aa, synthetic construct
  REGION 1..15: note = short peptide
RLASSVLRCGKKKVW

SEQ ID NO: 7974 - protein, 8 aa, synthetic construct
  REGION 1..8: note = short peptide
QGGGVGGF

SEQ ID NO: 7975 - protein, 10 aa, synthetic construct
  REGION 1..10: note = short peptide
QVIQGLVERL

SEQ ID NO: 7976 - protein, 13 aa, synthetic construct
  REGION 1..13: note = short peptide
QVPGSNPARYEFL

SEQ ID NO: 7977 - protein, 12 aa, synthetic construct
  REGION 1..12: note = short peptide
QVVGGIYGVLNR

SEQ ID NO: 7978 - protein, 10 aa, synthetic construct
  REGION 1..10: note = short peptide
QVVQSVVHLY

SEQ ID NO: 7979 - protein, 8 aa, synthetic construct
  REGION 1..8: note = short peptide
QWGGGSHY

SEQ ID NO: 7980 - protein, 8 aa, synthetic construct
  REGION 1..8: note = short peptide
RDAVKKCF

SEQ ID NO: 7981 - protein, 8 aa, synthetic construct
  REGION 1..8: note = short peptide
RDFDKCRF

SEQ ID NO: 7982 - protein, 9 aa, synthetic construct
  REGION 1..9: note = short peptide
RDHPVFCAL

SEQ ID NO: 7983 - protein, 10 aa, synthetic construct
  REGION 1..10: note = short peptide
QTPVISEPFR

SEQ ID NO: 7984 - protein, 10 aa, synthetic construct
  REGION 1..10: note = short peptide
QHCDLELSIL

SEQ ID NO: 7985 - protein, 12 aa, synthetic construct
  REGION 1..12: note = short peptide
QIVLLPAEARER

SEQ ID NO: 7986 - protein, 9 aa, synthetic construct
  REGION 1..9: note = short peptide
QLRAQEIAM

SEQ ID NO: 7987 - protein, 9 aa, synthetic construct
  REGION 1..9: note = short peptide
QQHCASPAF

SEQ ID NO: 7988 - protein, 10 aa, synthetic construct
  REGION 1..10: note = short peptide
QRAGARPGSL

SEQ ID NO: 7989 - protein, 9 aa, synthetic construct
  REGION 1..9: note = short peptide
QRDCTFLRI

SEQ ID NO: 7990 - protein, 8 aa, synthetic construct
  REGION 1..8: note = short peptide
QSRPVQHL

SEQ ID NO: 7991 - protein, 9 aa, synthetic construct
  REGION 1..9: note = short peptide
QTACLVNLR

SEQ ID NO: 7992 - protein, 10 aa, synthetic construct
  REGION 1..10: note = short peptide
QTIGNHASYY

SEQ ID NO: 7993 - protein, 9 aa, synthetic construct
  REGION 1..9: note = short peptide
RDSIRSCAL

SEQ ID NO: 7994 - protein, 9 aa, synthetic construct
  REGION 1..9: note = short peptide
RDSKKESCF

SEQ ID NO: 7995 - protein, 10 aa, synthetic construct
  REGION 1..10: note = short peptide
REVCEQNQQL

SEQ ID NO: 7996 - protein, 9 aa, synthetic construct
  REGION 1..9: note = short peptide
RHCGALRVL

SEQ ID NO: 7997 - protein, 12 aa, synthetic construct
  REGION 1..12: note = short peptide
RHSGIGHGQASS

SEQ ID NO: 7998 - protein, 10 aa, synthetic construct
  REGION 1..10: note = short peptide
RICLLHPVQK

SEQ ID NO: 7999 - protein, 11 aa, synthetic construct
  REGION 1..11: note = short peptide
RICRPLLIVEK

SEQ ID NO: 8000 - protein, 11 aa, synthetic construct
  REGION 1..11: note = short peptide
RILTAAALCHF

SEQ ID NO: 8001 - protein, 9 aa, synthetic construct
  REGION 1..9: note = short peptide
RINCNIFSY

SEQ ID NO: 8002 - protein, 9 aa, synthetic construct
  REGION 1..9: note = short peptide
RESPCHVKL

SEQ ID NO: 8003 - protein, 8 aa, synthetic construct
  REGION 1..8: note = short peptide
RESCVVSF

SEQ ID NO: 8004 - protein, 9 aa, synthetic construct
  REGION 1..9: note = short peptide
RECARLHYL

SEQ ID NO: 8005 - protein, 10 aa, synthetic construct
  REGION 1..10: note = short peptide
RECVGKTVTL

SEQ ID NO: 8006 - protein, 9 aa, synthetic construct
  REGION 1..9: note = short peptide
REQECEVKL

SEQ ID NO: 8007 - protein, 10 aa, synthetic construct
  REGION 1..10: note = short peptide
MERGLPLLCA

SEQ ID NO: 8008 - protein, 9 aa, synthetic construct
  REGION 1..9: note = short peptide
KMVDQLFCK

SEQ ID NO: 8009 - protein, 8 aa, synthetic construct
  REGION 1..8: note = short peptide
KNALIRHK

SEQ ID NO: 8010 - protein, 9 aa, synthetic construct
  REGION 1..9: note = short peptide
KNFFRVSFK

SEQ ID NO: 8011 - protein, 14 aa, synthetic construct
  REGION 1..14: note = short peptide
KMKDPKQIIRDMEK

SEQ ID NO: 8012 - protein, 9 aa, synthetic construct
  REGION 1..9: note = short peptide
KQSCQEESL

SEQ ID NO: 8013 - protein, 9 aa, synthetic construct
  REGION 1..9: note = short peptide
KRSPLTICY

SEQ ID NO: 8014 - protein, 9 aa, synthetic construct
  REGION 1..9: note = short peptide
KRYQQCVQK

SEQ ID NO: 8015 - protein, 10 aa, synthetic construct
  REGION 1..10: note = short peptide
KSEGEIARCK

SEQ ID NO: 8016 - protein, 11 aa, synthetic construct
  REGION 1..11: note = short peptide
KSLCPETWPTW

SEQ ID NO: 8017 - protein, 9 aa, synthetic construct
  REGION 1..9: note = short peptide
KSPIAPCSL

SEQ ID NO: 8018 - protein, 12 aa, synthetic construct
  REGION 1..12: note = short peptide
KPIGCSVAISTY

SEQ ID NO: 8019 - protein, 9 aa, synthetic construct
  REGION 1..9: note = short peptide
KQAAKCLLL

SEQ ID NO: 8020 - protein, 9 aa, synthetic construct
  REGION 1..9: note = short peptide
KPTTVTECL

SEQ ID NO: 8021 - protein, 9 aa, synthetic construct
  REGION 1..9: note = short peptide
KPYCNEIHA

SEQ ID NO: 8022 - protein, 10 aa, synthetic construct
  REGION 1..10: note = short peptide
KHAGNIKEAA

SEQ ID NO: 8023 - protein, 9 aa, synthetic construct
  REGION 1..9: note = short peptide
KICKQFRMK

SEQ ID NO: 8024 - protein, 12 aa, synthetic construct
  REGION 1..12: note = short peptide
KISGPNPLSCLK

SEQ ID NO: 8025 - protein, 10 aa, synthetic construct
  REGION 1..10: note = short peptide
KEVIGGLCSL

SEQ ID NO: 8026 - protein, 8 aa, synthetic construct
  REGION 1..8: note = short peptide
KFVPNLPK

SEQ ID NO: 8027 - protein, 9 aa, synthetic construct
  REGION 1..9: note = short peptide
KGDIKQQAW

SEQ ID NO: 8028 - protein, 10 aa, synthetic construct
  REGION 1..10: note = short peptide
KGEKGSGNTL

SEQ ID NO: 8029 - protein, 9 aa, synthetic construct
  REGION 1..9: note = short peptide
KLNLCRKYY

SEQ ID NO: 8030 - protein, 11 aa, synthetic construct
  REGION 1..11: note = short peptide
KLSYVKTCQEK

SEQ ID NO: 8031 - protein, 9 aa, synthetic construct
  REGION 1..9: note = short peptide
KLVCYYTSW

SEQ ID NO: 8032 - protein, 11 aa, synthetic construct
  REGION 1..11: note = short peptide
KLWESPNVLCL

SEQ ID NO: 8033 - protein, 9 aa, synthetic construct
  REGION 1..9: note = short peptide
KLWGVCVSI

SEQ ID NO: 8034 - protein, 10 aa, synthetic construct
  REGION 1..10: note = short peptide
KMCTEKIQEK

SEQ ID NO: 8035 - protein, 9 aa, synthetic construct
  REGION 1..9: note = short peptide
KLNAEVACV

SEQ ID NO: 8036 - protein, 13 aa, synthetic construct
  REGION 1..13: note = short peptide
KKNIMALSDGGKL

SEQ ID NO: 8037 - protein, 9 aa, synthetic construct
  REGION 1..9: note = short peptide
KLKEYVDCL

SEQ ID NO: 8038 - protein, 9 aa, synthetic construct
  REGION 1..9: note = short peptide
KLKGISICF

SEQ ID NO: 8039 - protein, 9 aa, synthetic construct
  REGION 1..9: note = short peptide
KSVPLCILY

SEQ ID NO: 8040 - protein, 9 aa, synthetic construct
  REGION 1..9: note = short peptide
LPTSTIASC

SEQ ID NO: 8041 - protein, 10 aa, synthetic construct
  REGION 1..10: note = short peptide
LPYFACQIAA

SEQ ID NO: 8042 - protein, 9 aa, synthetic construct
  REGION 1..9: note = short peptide
LQHYILTLM

SEQ ID NO: 8043 - protein, 15 aa, synthetic construct
  REGION 1..15: note = short peptide
LQQCPFEDHVKLVNE

SEQ ID NO: 8044 - protein, 10 aa, synthetic construct
  REGION 1..10: note = short peptide
LPCSFVTHAL

SEQ ID NO: 8045 - protein, 9 aa, synthetic construct
  REGION 1..9: note = short peptide
LPARFFSCM

SEQ ID NO: 8046 - protein, 9 aa, synthetic construct
  REGION 1..9: note = short peptide
LPLPCVKKI

SEQ ID NO: 8047 - protein, 9 aa, synthetic construct
  REGION 1..9: note = short peptide
LPFCKFVSA

SEQ ID NO: 8048 - protein, 9 aa, synthetic construct
  REGION 1..9: note = short peptide
LPKTCDISF

SEQ ID NO: 8049 - protein, 11 aa, synthetic construct
  REGION 1..11: note = short peptide
LPLASTSKCTL

SEQ ID NO: 8050 - protein, 10 aa, synthetic construct
  REGION 1..10: note = short peptide
MAISIVCDEY

SEQ ID NO: 8051 - protein, 9 aa, synthetic construct
  REGION 1..9: note = short peptide
LVANHVASD

SEQ ID NO: 8052 - protein, 14 aa, synthetic construct
  REGION 1..14: note = short peptide
LSPCFRDVQIGDIV

SEQ ID NO: 8053 - protein, 8 aa, synthetic construct
  REGION 1..8: note = short peptide
LSRLVNCL

SEQ ID NO: 8054 - protein, 10 aa, synthetic construct
  REGION 1..10: note = short peptide
LSSPVPAVCR

SEQ ID NO: 8055 - protein, 8 aa, synthetic construct
  REGION 1..8: note = short peptide
LVANHVAS

SEQ ID NO: 8056 - protein, 10 aa, synthetic construct
  REGION 1..10: note = short peptide
LVDCTSSVTF

SEQ ID NO: 8057 - protein, 9 aa, synthetic construct
  REGION 1..9: note = short peptide
LYAKCIPCI

SEQ ID NO: 8058 - protein, 9 aa, synthetic construct
  REGION 1..9: note = short peptide
LYIGCKMYY

SEQ ID NO: 8059 - protein, 9 aa, synthetic construct
  REGION 1..9: note = short peptide
LYYGGHLCY

SEQ ID NO: 8060 - protein, 9 aa, synthetic construct
  REGION 1..9: note = short peptide
KTAPCVRLL

SEQ ID NO: 8061 - protein, 11 aa, synthetic construct
  REGION 1..11: note = short peptide
KVLACPFLREK

SEQ ID NO: 8062 - protein, 9 aa, synthetic construct
  REGION 1..9: note = short peptide
KVYGKYCEK

SEQ ID NO: 8063 - protein, 9 aa, synthetic construct
  REGION 1..9: note = short peptide
KYLPCFQVL

SEQ ID NO: 8064 - protein, 10 aa, synthetic construct
  REGION 1..10: note = short peptide
KVIEIVTDCK

SEQ ID NO: 8065 - protein, 9 aa, synthetic construct
  REGION 1..9: note = short peptide
KVGDCVFIK

SEQ ID NO: 8066 - protein, 9 aa, synthetic construct
  REGION 1..9: note = short peptide
KTCGGTYIK

SEQ ID NO: 8067 - protein, 9 aa, synthetic construct
  REGION 1..9: note = short peptide
KTDPCTLQF

SEQ ID NO: 8068 - protein, 10 aa, synthetic construct
  REGION 1..10: note = short peptide
KTFDSSCHFF

SEQ ID NO: 8069 - protein, 11 aa, synthetic construct
  REGION 1..11: note = short peptide
KTIDKILKCKL

SEQ ID NO: 8070 - protein, 10 aa, synthetic construct
  REGION 1..10: note = short peptide
KTKRDAANCW

SEQ ID NO: 8071 - protein, 9 aa, synthetic construct
  REGION 1..9: note = short peptide
KVCRGYLVK

SEQ ID NO: 8072 - protein, 10 aa, synthetic construct
  REGION 1..10: note = short peptide
KTMDPSCLKW

SEQ ID NO: 8073 - protein, 10 aa, synthetic construct
  REGION 1..10: note = short peptide
KTTECSNTFK

SEQ ID NO: 8074 - protein, 10 aa, synthetic construct
  REGION 1..10: note = short peptide
KVCGKSFNRM

SEQ ID NO: 8075 - protein, 9 aa, synthetic construct
  REGION 1..9: note = short peptide
LLCDLINKL

SEQ ID NO: 8076 - protein, 10 aa, synthetic construct
  REGION 1..10: note = short peptide
LLQDKATCPK

SEQ ID NO: 8077 - protein, 9 aa, synthetic construct
  REGION 1..9: note = short peptide
LLSCKMLLH

SEQ ID NO: 8078 - protein, 9 aa, synthetic construct
  REGION 1..9: note = short peptide
LLSCTLSTK

SEQ ID NO: 8079 - protein, 9 aa, synthetic construct
  REGION 1..9: note = short peptide
LLTELCQRV

SEQ ID NO: 8080 - protein, 9 aa, synthetic construct
  REGION 1..9: note = short peptide
LHNKVCQQL

SEQ ID NO: 8081 - protein, 9 aa, synthetic construct
  REGION 1..9: note = short peptide
LFCDVKLQY

SEQ ID NO: 8082 - protein, 10 aa, synthetic construct
  REGION 1..10: note = short peptide
YYNPYTGCII

SEQ ID NO: 8083 - protein, 9 aa, synthetic construct
  REGION 1..9: note = short peptide
TICARVTNK

SEQ ID NO: 8084 - protein, 9 aa, synthetic construct
  REGION 1..9: note = short peptide
GEVNDIKTR

SEQ ID NO: 8085 - protein, 11 aa, synthetic construct
  REGION 1..11: note = short peptide
FTDGITNKLVA

SEQ ID NO: 8086 - protein, 10 aa, synthetic construct
  REGION 1..10: note = short peptide
FLDGMNYLRY

SEQ ID NO: 8087 - protein, 12 aa, synthetic construct
  REGION 1..12: note = short peptide
TFQMKKNAEELK

SEQ ID NO: 8088 - protein, 9 aa, synthetic construct
  REGION 1..9: note = short peptide
VTFCGHTSK

SEQ ID NO: 8089 - protein, 9 aa, synthetic construct
  REGION 1..9: note = short peptide
AQHCHLHAR

SEQ ID NO: 8090 - protein, 9 aa, synthetic construct
  REGION 1..9: note = short peptide
ATCHSLLNK

SEQ ID NO: 8091 - protein, 10 aa, synthetic construct
  REGION 1..10: note = short peptide
AVREESIHCK

SEQ ID NO: 8092 - protein, 9 aa, synthetic construct
  REGION 1..9: note = short peptide
AVKTGSICW

SEQ ID NO: 8093 - protein, 9 aa, synthetic construct
  REGION 1..9: note = short peptide
YMAGPLCKY

SEQ ID NO: 8094 - protein, 9 aa, synthetic construct
  REGION 1..9: note = short peptide
AHSREQYCL

SEQ ID NO: 8095 - protein, 9 aa, synthetic construct
  REGION 1..9: note = short peptide
YPLTCKVVY

SEQ ID NO: 8096 - protein, 13 aa, synthetic construct
  REGION 1..13: note = short peptide
VYIPPIINKGDLW

SEQ ID NO: 8097 - protein, 9 aa, synthetic construct
  REGION 1..9: note = short peptide
TQQLQTTCH

SEQ ID NO: 8098 - protein, 9 aa, synthetic construct
  REGION 1..9: note = short peptide
VMLPDSLHY

SEQ ID NO: 8099 - protein, 9 aa, synthetic construct
  REGION 1..9: note = short peptide
VHDCVNITI

SEQ ID NO: 8100 - protein, 9 aa, synthetic construct
  REGION 1..9: note = short peptide
TYIHALDNG

SEQ ID NO: 8101 - protein, 8 aa, synthetic construct
  REGION 1..8: note = short peptide
DLRLKHCL

SEQ ID NO: 8102 - protein, 9 aa, synthetic construct
  REGION 1..9: note = short peptide
LAAPRGACY

SEQ ID NO: 8103 - protein, 9 aa, synthetic construct
  REGION 1..9: note = short peptide
QHGEEECKF

SEQ ID NO: 8104 - protein, 10 aa, synthetic construct
  REGION 1..10: note = short peptide
LPAQPLPLSV

SEQ ID NO: 8105 - protein, 9 aa, synthetic construct
  REGION 1..9: note = short peptide
LPCGAGKSL

SEQ ID NO: 8106 - protein, 10 aa, synthetic construct
  REGION 1..10: note = short peptide
QAVVALAVGR

SEQ ID NO: 8107 - protein, 9 aa, synthetic construct
  REGION 1..9: note = short peptide
KPKPSSSCC

SEQ ID NO: 8108 - protein, 9 aa, synthetic construct
  REGION 1..9: note = short peptide
RIKKGSHRW

SEQ ID NO: 8109 - protein, 9 aa, synthetic construct
  REGION 1..9: note = short peptide
QVNNISHTK

SEQ ID NO: 8110 - protein, 9 aa, synthetic construct
  REGION 1..9: note = short peptide
KVCEETLAY

SEQ ID NO: 8111 - protein, 10 aa, synthetic construct
  REGION 1..10: note = short peptide
KSKVTNGVGK

SEQ ID NO: 8112 - protein, 9 aa, synthetic construct
  REGION 1..9: note = short peptide
KSHVECARF

SEQ ID NO: 8113 - protein, 9 aa, synthetic construct
  REGION 1..9: note = short peptide
REAKVQWKV

SEQ ID NO: 8114 - protein, 8 aa, synthetic construct
  REGION 1..8: note = short peptide
RDYCAHHL

SEQ ID NO: 8115 - protein, 8 aa, synthetic construct
  REGION 1..8: note = short peptide
RDVLAWTF

SEQ ID NO: 8116 - protein, 13 aa, synthetic construct
  REGION 1..13: note = short peptide
MRYGVNGVGKILK

SEQ ID NO: 8117 - protein, 9 aa, synthetic construct
  REGION 1..9: note = short peptide
MHALLAIAL

SEQ ID NO: 8118 - protein, 9 aa, synthetic construct
  REGION 1..9: note = short peptide
MHEALHNRF

SEQ ID NO: 8119 - protein, 10 aa, synthetic construct
  REGION 1..10: note = short peptide
MPHLSMQQVL

SEQ ID NO: 8120 - protein, 8 aa, synthetic construct
  REGION 1..8: note = short peptide
NFIFHKVL

SEQ ID NO: 8121 - protein, 9 aa, synthetic construct
  REGION 1..9: note = short peptide
NILHKPLSL

SEQ ID NO: 8122 - protein, 9 aa, synthetic construct
  REGION 1..9: note = short peptide
LSHGSAQVK

SEQ ID NO: 8123 - protein, 9 aa, synthetic construct
  REGION 1..9: note = short peptide
NAGGLHHHR

SEQ ID NO: 8124 - protein, 9 aa, synthetic construct
  REGION 1..9: note = short peptide
HVCGVHLNR

SEQ ID NO: 8125 - protein, 11 aa, synthetic construct
  REGION 1..11: note = short peptide
HVRDEGEFTCR

SEQ ID NO: 8126 - protein, 15 aa, synthetic construct
  REGION 1..15: note = short peptide
SAPPQLPSFYKIGSK

SEQ ID NO: 8127 - protein, 15 aa, synthetic construct
  REGION 1..15: note = short peptide
IPFPPPPQNGIPTEY

SEQ ID NO: 8128 - protein, 10 aa, synthetic construct
  REGION 1..10: note = short peptide
HQHIGKPSTI

SEQ ID NO: 8129 - protein, 11 aa, synthetic construct
  REGION 1..11: note = short peptide
HPVSFDKACEF

SEQ ID NO: 8130 - protein, 9 aa, synthetic construct
  REGION 1..9: note = short peptide
SPLQFYVNY

SEQ ID NO: 8131 - protein, 8 aa, synthetic construct
  REGION 1..8: note = short peptide
SPHEHQCL

SEQ ID NO: 8132 - protein, 10 aa, synthetic construct
  REGION 1..10: note = short peptide
HPVLAQCDVF

SEQ ID NO: 8133 - protein, 8 aa, synthetic construct
  REGION 1..8: note = short peptide
HPGFHQED

SEQ ID NO: 8134 - protein, 9 aa, synthetic construct
  REGION 1..9: note = short peptide
HPHLKILHM

SEQ ID NO: 8135 - protein, 11 aa, synthetic construct
  REGION 1..11: note = short peptide
HMHHEDQQVRY

SEQ ID NO: 8136 - protein, 12 aa, synthetic construct
  REGION 1..12: note = short peptide
RMQHKKDHPDYK

SEQ ID NO: 8137 - protein, 10 aa, synthetic construct
  REGION 1..10: note = short peptide
KLHTNFHIPK

SEQ ID NO: 8138 - protein, 11 aa, synthetic construct
  REGION 1..11: note = short peptide
KLKDEGCRAFY

SEQ ID NO: 8139 - protein, 9 aa, synthetic construct
  REGION 1..9: note = short peptide
KLKQKGAIR

SEQ ID NO: 8140 - protein, 15 aa, synthetic construct
  REGION 1..15: note = short peptide
RLWDPNNPDQKPALK

SEQ ID NO: 8141 - protein, 9 aa, synthetic construct
  REGION 1..9: note = short peptide
RLSEICVAK

SEQ ID NO: 8142 - protein, 9 aa, synthetic construct
  REGION 1..9: note = short peptide
RVAGCSVHK

SEQ ID NO: 8143 - protein, 12 aa, synthetic construct
  REGION 1..12: note = short peptide
RSRPVESSCSSK

SEQ ID NO: 8144 - protein, 9 aa, synthetic construct
  REGION 1..9: note = short peptide
AAACRSVKG

SEQ ID NO: 8145 - protein, 10 aa, synthetic construct
  REGION 1..10: note = short peptide
TAAQITQRKW

SEQ ID NO: 8146 - protein, 11 aa, synthetic construct
  REGION 1..11: note = short peptide
KSSQKESAVQR

SEQ ID NO: 8147 - protein, 11 aa, synthetic construct
  REGION 1..11: note = short peptide
KVKIPEELKPW

SEQ ID NO: 8148 - protein, 9 aa, synthetic construct
  REGION 1..9: note = short peptide
KRVFPKWTY

SEQ ID NO: 8149 - protein, 9 aa, synthetic construct
  REGION 1..9: note = short peptide
YIQDRIPSW

SEQ ID NO: 8150 - protein, 12 aa, synthetic construct
  REGION 1..12: note = short peptide
YSTQTAQTLKQK

SEQ ID NO: 8151 - protein, 10 aa, synthetic construct
  REGION 1..10: note = short peptide
SVLDYFHIAP

SEQ ID NO: 8152 - protein, 10 aa, synthetic construct
  REGION 1..10: note = short peptide
VDVQGPDWHL

SEQ ID NO: 8153 - protein, 10 aa, synthetic construct
  REGION 1..10: note = short peptide
VDVQGPDWHL

SEQ ID NO: 8154 - protein, 8 aa, synthetic construct
  REGION 1..8: note = short peptide
TNVDKLVK

SEQ ID NO: 8155 - protein, 10 aa, synthetic construct
  REGION 1..10: note = short peptide
VAPGNVRVNV

SEQ ID NO: 8156 - protein, 13 aa, synthetic construct
  REGION 1..13: note = short peptide
TTFTGHTGDVMSL

SEQ ID NO: 8157 - protein, 11 aa, synthetic construct
  REGION 1..11: note = short peptide
KTNLDFKVPNG

SEQ ID NO: 8158 - protein, 9 aa, synthetic construct
  REGION 1..9: note = short peptide
APRLPLPHV

SEQ ID NO: 8159 - protein, 8 aa, synthetic construct
  REGION 1..8: note = short peptide
TTPAATNI

SEQ ID NO: 8160 - protein, 10 aa, synthetic construct
  REGION 1..10: note = short peptide
AQKSGKEQQL

SEQ ID NO: 8161 - protein, 14 aa, synthetic construct
  REGION 1..14: note = short peptide
ASGKQEPEAKEAPA

SEQ ID NO: 8162 - protein, 8 aa, synthetic construct
  REGION 1..8: note = short peptide
TQTVRKVR

SEQ ID NO: 8163 - protein, 15 aa, synthetic construct
  REGION 1..15: note = short peptide
KTNESVSEPRKGFMY

SEQ ID NO: 8164 - protein, 9 aa, synthetic construct
  REGION 1..9: note = short peptide
ASCKVPVKK

SEQ ID NO: 8165 - protein, 9 aa, synthetic construct
  REGION 1..9: note = short peptide
DANHKLVFI

SEQ ID NO: 8166 - protein, 10 aa, synthetic construct
  REGION 1..10: note = short peptide
KRWQAIYKQF

SEQ ID NO: 8167 - protein, 12 aa, synthetic construct
  REGION 1..12: note = short peptide
VVQNIQDICNSK

SEQ ID NO: 8168 - protein, 15 aa, synthetic construct
  REGION 1..15: note = short peptide
AFKKKFACNGTVIEH

SEQ ID NO: 8169 - protein, 10 aa, synthetic construct
  REGION 1..10: note = short peptide
TKAGHGAGKP

SEQ ID NO: 8170 - protein, 10 aa, synthetic construct
  REGION 1..10: note = short peptide
CCPRLKILRL

SEQ ID NO: 8171 - protein, 10 aa, synthetic construct
  REGION 1..10: note = short peptide
AHSNYRAGMI

SEQ ID NO: 8172 - protein, 9 aa, synthetic construct
  REGION 1..9: note = short peptide
THDLKNIRF

SEQ ID NO: 8173 - protein, 11 aa, synthetic construct
  REGION 1..11: note = short peptide
VPHPNWPNHTL

SEQ ID NO: 8174 - protein, 11 aa, synthetic construct
  REGION 1..11: note = short peptide
TGSTDATIRAW

SEQ ID NO: 8175 - protein, 11 aa, synthetic construct
  REGION 1..11: note = short peptide
VPHPNWPNHTL

SEQ ID NO: 8176 - protein, 8 aa, synthetic construct
  REGION 1..8: note = short peptide
KAKVNRAF

SEQ ID NO: 8177 - protein, 9 aa, synthetic construct
  REGION 1..9: note = short peptide
KAGVKINPK

SEQ ID NO: 8178 - protein, 13 aa, synthetic construct
  REGION 1..13: note = short peptide
NTRLNRGEYVDVP

SEQ ID NO: 8179 - protein, 10 aa, synthetic construct
  REGION 1..10: note = short peptide
PEGNFKISKF

SEQ ID NO: 8180 - protein, 10 aa, synthetic construct
  REGION 1..10: note = short peptide
ITLMLNPLIY

SEQ ID NO: 8181 - protein, 10 aa, synthetic construct
  REGION 1..10: note = short peptide
IYIDASCLTW

SEQ ID NO: 8182 - protein, 11 aa, synthetic construct
  REGION 1..11: note = short peptide
NVYLIKGKTLR

SEQ ID NO: 8183 - protein, 10 aa, synthetic construct
  REGION 1..10: note = short peptide
PAAQVILNKY

SEQ ID NO: 8184 - protein, 9 aa, synthetic construct
  REGION 1..9: note = short peptide
PAFDPNPSL

SEQ ID NO: 8185 - protein, 11 aa, synthetic construct
  REGION 1..11: note = short peptide
KCPKCDKTVYF

SEQ ID NO: 8186 - protein, 9 aa, synthetic construct
  REGION 1..9: note = short peptide
NLKNSKVSV

SEQ ID NO: 8187 - protein, 12 aa, synthetic construct
  REGION 1..12: note = short peptide
KCAACQKHFCVG

SEQ ID NO: 8188 - protein, 15 aa, synthetic construct
  REGION 1..15: note = short peptide
NCKLLEILCLLLNEQ

SEQ ID NO: 8189 - protein, 10 aa, synthetic construct
  REGION 1..10: note = short peptide
NGGGWTPLMY

SEQ ID NO: 8190 - protein, 14 aa, synthetic construct
  REGION 1..14: note = short peptide
QSSGSVGSSGISSI

SEQ ID NO: 8191 - protein, 9 aa, synthetic construct
  REGION 1..9: note = short peptide
QRLLQRPRP

SEQ ID NO: 8192 - protein, 8 aa, synthetic construct
  REGION 1..8: note = short peptide
IANNPHLL

SEQ ID NO: 8193 - protein, 10 aa, synthetic construct
  REGION 1..10: note = short peptide
QLENRILNQT

SEQ ID NO: 8194 - protein, 15 aa, synthetic construct
  REGION 1..15: note = short peptide
HSQPFKQEWLNKHSM

SEQ ID NO: 8195 - protein, 8 aa, synthetic construct
  REGION 1..8: note = short peptide
RCFLSWLV

SEQ ID NO: 8196 - protein, 8 aa, synthetic construct
  REGION 1..8: note = short peptide
QVFNQIVK

SEQ ID NO: 8197 - protein, 8 aa, synthetic construct
  REGION 1..8: note = short peptide
PGPQGQFR

SEQ ID NO: 8198 - protein, 13 aa, synthetic construct
  REGION 1..13: note = short peptide
IPVGLLGKDICAC

SEQ ID NO: 8199 - protein, 14 aa, synthetic construct
  REGION 1..14: note = short peptide
QDKTLSLPELEQQQ

SEQ ID NO: 8200 - protein, 9 aa, synthetic construct
  REGION 1..9: note = short peptide
LDDRILQCI

SEQ ID NO: 8201 - protein, 12 aa, synthetic construct
  REGION 1..12: note = short peptide
KLILQNHILKVK

SEQ ID NO: 8202 - protein, 8 aa, synthetic construct
  REGION 1..8: note = short peptide
KLICVKAL

SEQ ID NO: 8203 - protein, 8 aa, synthetic construct
  REGION 1..8: note = short peptide
KLNQLWEK

SEQ ID NO: 8204 - protein, 15 aa, synthetic construct
  REGION 1..15: note = short peptide
LLEETWGKPSWGPNI

SEQ ID NO: 8205 - protein, 8 aa, synthetic construct
  REGION 1..8: note = short peptide
KLHKLLSY

SEQ ID NO: 8206 - protein, 8 aa, synthetic construct
  REGION 1..8: note = short peptide
KLGHQDKL

SEQ ID NO: 8207 - protein, 15 aa, synthetic construct
  REGION 1..15: note = short peptide
LLCKCDQEIANCLAQ

SEQ ID NO: 8208 - protein, 10 aa, synthetic construct
  REGION 1..10: note = short peptide
KNNSLNELMK

SEQ ID NO: 8209 - protein, 9 aa, synthetic construct
  REGION 1..9: note = short peptide
KNVLELTLY

SEQ ID NO: 8210 - protein, 9 aa, synthetic construct
  REGION 1..9: note = short peptide
LSNNAIHSL

SEQ ID NO: 8211 - protein, 10 aa, synthetic construct
  REGION 1..10: note = short peptide
KLQVNTPLVG

SEQ ID NO: 8212 - protein, 12 aa, synthetic construct
  REGION 1..12: note = short peptide
LPWSADRAIQQF

SEQ ID NO: 8213 - protein, 9 aa, synthetic construct
  REGION 1..9: note = short peptide
KNSVNSHTI

SEQ ID NO: 8214 - protein, 9 aa, synthetic construct
  REGION 1..9: note = short peptide
KKPNKKEQL

SEQ ID NO: 8215 - protein, 15 aa, synthetic construct
  REGION 1..15: note = short peptide
KGSDTDSEHSAAGSP

SEQ ID NO: 8216 - protein, 12 aa, synthetic construct
  REGION 1..12: note = short peptide
KGKNQKVLSKNL

SEQ ID NO: 8217 - protein, 10 aa, synthetic construct
  REGION 1..10: note = short peptide
MPHEDCITAL

SEQ ID NO: 8218 - protein, 12 aa, synthetic construct
  REGION 1..12: note = short peptide
KIHRAEVTEEFK

SEQ ID NO: 8219 - protein, 9 aa, synthetic construct
  REGION 1..9: note = short peptide
FVEKHFNDL

SEQ ID NO: 8220 - protein, 15 aa, synthetic construct
  REGION 1..15: note = short peptide
SGCGGCGSSCGGCGS

SEQ ID NO: 8221 - protein, 10 aa, synthetic construct
  REGION 1..10: note = short peptide
FTCKVPGLYY

SEQ ID NO: 8222 - protein, 11 aa, synthetic construct
  REGION 1..11: note = short peptide
SITNFLVMGGF

SEQ ID NO: 8223 - protein, 12 aa, synthetic construct
  REGION 1..12: note = short peptide
GAGAAPGPHLPP

SEQ ID NO: 8224 - protein, 14 aa, synthetic construct
  REGION 1..14: note = short peptide
KQKRTPKRTSAAAK

SEQ ID NO: 8225 - protein, 13 aa, synthetic construct
  REGION 1..13: note = short peptide
GAIDHISIRQLQL

SEQ ID NO: 8226 - protein, 11 aa, synthetic construct
  REGION 1..11: note = short peptide
ENIGYVLYGIY

SEQ ID NO: 8227 - protein, 9 aa, synthetic construct
  REGION 1..9: note = short peptide
ERDPSKIKW

SEQ ID NO: 8228 - protein, 10 aa, synthetic construct
  REGION 1..10: note = short peptide
EIYDCKVEHW

SEQ ID NO: 8229 - protein, 9 aa, synthetic construct
  REGION 1..9: note = short peptide
SLKANIPEV

SEQ ID NO: 8230 - protein, 10 aa, synthetic construct
  REGION 1..10: note = short peptide
FESNGSFLCK

SEQ ID NO: 8231 - protein, 10 aa, synthetic construct
  REGION 1..10: note = short peptide
SLMDHTIPEV

SEQ ID NO: 8232 - protein, 12 aa, synthetic construct
  REGION 1..12: note = short peptide
EVANSTANLVKT

SEQ ID NO: 8233 - protein, 15 aa, synthetic construct
  REGION 1..15: note = short peptide
EVGVNAENVWSDCIS

SEQ ID NO: 8234 - protein, 13 aa, synthetic construct
  REGION 1..13: note = short peptide
SLVLVCVLAALCF

SEQ ID NO: 8235 - protein, 9 aa, synthetic construct
  REGION 1..9: note = short peptide
RNSFRYNGL

SEQ ID NO: 8236 - protein, 8 aa, synthetic construct
  REGION 1..8: note = short peptide
HAFITKFN

SEQ ID NO: 8237 - protein, 10 aa, synthetic construct
  REGION 1..10: note = short peptide
HLQTVQQNTI

SEQ ID NO: 8238 - protein, 9 aa, synthetic construct
  REGION 1..9: note = short peptide
HPGTVVTVL

SEQ ID NO: 8239 - protein, 9 aa, synthetic construct
  REGION 1..9: note = short peptide
HIHKSLIGK

SEQ ID NO: 8240 - protein, 10 aa, synthetic construct
  REGION 1..10: note = short peptide
KPNDSRALQL

SEQ ID NO: 8241 - protein, 10 aa, synthetic construct
  REGION 1..10: note = short peptide
RHRRVVGTLH

SEQ ID NO: 8242 - protein, 9 aa, synthetic construct
  REGION 1..9: note = short peptide
RTLPWSSVL

SEQ ID NO: 8243 - protein, 9 aa, synthetic construct
  REGION 1..9: note = short peptide
RVYKFCSKL

SEQ ID NO: 8244 - protein, 10 aa, synthetic construct
  REGION 1..10: note = short peptide
RYCKNKPYPK

SEQ ID NO: 8245 - protein, 10 aa, synthetic construct
  REGION 1..10: note = short peptide
RPWLEGRHTL

SEQ ID NO: 8246 - protein, 9 aa, synthetic construct
  REGION 1..9: note = short peptide
RSISTPTCL

SEQ ID NO: 8247 - protein, 10 aa, synthetic construct
  REGION 1..10: note = short peptide
RVYGGCLCYG

SEQ ID NO: 8248 - protein, 10 aa, synthetic construct
  REGION 1..10: note = short peptide
RVYGGCLCYG

SEQ ID NO: 8249 - protein, 9 aa, synthetic construct
  REGION 1..9: note = short peptide
SFHNFTLCY

SEQ ID NO: 8250 - protein, 9 aa, synthetic construct
  REGION 1..9: note = short peptide
SFHNFTLCY

SEQ ID NO: 8251 - protein, 8 aa, synthetic construct
  REGION 1..8: note = short peptide
TSNGHEVF

SEQ ID NO: 8252 - protein, 8 aa, synthetic construct
  REGION 1..8: note = short peptide
TSNGHEVF

SEQ ID NO: 8253 - protein, 12 aa, synthetic construct
  REGION 1..12: note = short peptide
YSDLGNHTTCRY

SEQ ID NO: 8254 - protein, 12 aa, synthetic construct
  REGION 1..12: note = short peptide
YSDLGNHTTCRY

SEQ ID NO: 8255 - protein, 11 aa, synthetic construct
  REGION 1..11: note = short peptide
TVFQCDPGYAL

SEQ ID NO: 8256 - protein, 11 aa, synthetic construct
  REGION 1..11: note = short peptide
TVFQCDPGYAL

SEQ ID NO: 8257 - protein, 10 aa, synthetic construct
  REGION 1..10: note = short peptide
FLVLWLQLCW

SEQ ID NO: 8258 - protein, 10 aa, synthetic construct
  REGION 1..10: note = short peptide
FLVLWLQLCW

SEQ ID NO: 8259 - protein, 10 aa, synthetic construct
  REGION 1..10: note = short peptide
DVSNQTSCRL

SEQ ID NO: 8260 - protein, 10 aa, synthetic construct
  REGION 1..10: note = short peptide
DVSNQTSCRL

SEQ ID NO: 8261 - protein, 11 aa, synthetic construct
  REGION 1..11: note = short peptide
PGLCLNAVALY

SEQ ID NO: 8262 - protein, 11 aa, synthetic construct
  REGION 1..11: note = short peptide
PGLCLNAVALY

SEQ ID NO: 8263 - protein, 15 aa, synthetic construct
  REGION 1..15: note = short peptide
NCPFHYNPAQYDYDR

SEQ ID NO: 8264 - protein, 15 aa, synthetic construct
  REGION 1..15: note = short peptide
NCPFHYNPAQYDYDR

SEQ ID NO: 8265 - protein, 15 aa, synthetic construct
  REGION 1..15: note = short peptide
NCPFHYNPAQYDYDR

SEQ ID NO: 8266 - protein, 15 aa, synthetic construct
  REGION 1..15: note = short peptide
NCPFHYNPAQYDYDR

SEQ ID NO: 8267 - protein, 15 aa, synthetic construct
  REGION 1..15: note = short peptide
RLWDCETGKQLALLK

SEQ ID NO: 8268 - protein, 15 aa, synthetic construct
  REGION 1..15: note = short peptide
RLWDCETGKQLALLK

SEQ ID NO: 8269 - protein, 8 aa, synthetic construct
  REGION 1..8: note = short peptide
QWGGGSHY

SEQ ID NO: 8270 - protein, 8 aa, synthetic construct
  REGION 1..8: note = short peptide
QWGGGSHY

SEQ ID NO: 8271 - protein, 15 aa, synthetic construct
  REGION 1..15: note = short peptide
LQQCPFEDHVKLVNE

SEQ ID NO: 8272 - protein, 15 aa, synthetic construct
  REGION 1..15: note = short peptide
LQQCPFEDHVKLVNE

SEQ ID NO: 8273 - protein, 9 aa, synthetic construct
  REGION 1..9: note = short peptide
VHDCVNITI

SEQ ID NO: 8274 - protein, 9 aa, synthetic construct
  REGION 1..9: note = short peptide
VHDCVNITI

SEQ ID NO: 8275 - protein, 9 aa, synthetic construct
  REGION 1..9: note = short peptide
NAGGLHHHR

SEQ ID NO: 8276 - protein, 9 aa, synthetic construct
  REGION 1..9: note = short peptide
NAGGLHHHR

SEQ ID NO: 8277 - protein, 10 aa, synthetic construct
  REGION 1..10: note = short peptide
RQASIELPSM

SEQ ID NO: 8278 - protein, 11 aa, synthetic construct
  REGION 1..11: note = short peptide
ASTSTTIRSHS

SEQ ID NO: 8279 - protein, 8 aa, synthetic construct
  REGION 1..8: note = short peptide
KKALLLYK

SEQ ID NO: 8280 - protein, 9 aa, synthetic construct
  REGION 1..9: note = short peptide
SPMADRSMM

SEQ ID NO: 8281 - protein, 10 aa, synthetic construct
  REGION 1..10: note = short peptide
SHSDDGCLKL

SEQ ID NO: 8282 - protein, 10 aa, synthetic construct
  REGION 1..10: note = short peptide
TGGDNQLLLY

SEQ ID NO: 8283 - protein, 12 aa, synthetic construct
  REGION 1..12: note = short peptide
YSDLGNHTTCRY

SEQ ID NO: 8284 - protein, 9 aa, synthetic construct
  REGION 1..9: note = short peptide
GVKKPHRYR

SEQ ID NO: 8285 - protein, 10 aa, synthetic construct
  REGION 1..10: note = short peptide
NPEPKFGGKY

SEQ ID NO: 8286 - protein, 15 aa, synthetic construct
  REGION 1..15: note = short peptide
SFEAQGALANIAVDK

SEQ ID NO: 8287 - protein, 11 aa, synthetic construct
  REGION 1..11: note = short peptide
VHNITVCEQKI

SEQ ID NO: 8288 - protein, 9 aa, synthetic construct
  REGION 1..9: note = short peptide
SSCDQPIGY

SEQ ID NO: 8289 - protein, 11 aa, synthetic construct
  REGION 1..11: note = short peptide
HPDTKKFLCSL

SEQ ID NO: 8290 - protein, 10 aa, synthetic construct
  REGION 1..10: note = short peptide
HHSPGQTPTL

SEQ ID NO: 8291 - protein, 9 aa, synthetic construct
  REGION 1..9: note = short peptide
HHNSTLLRY

SEQ ID NO: 8292 - protein, 8 aa, synthetic construct
  REGION 1..8: note = short peptide
IVDSPEKL

SEQ ID NO: 8293 - protein, 9 aa, synthetic construct
  REGION 1..9: note = short peptide
RHCDLQVRI

SEQ ID NO: 8294 - protein, 13 aa, synthetic construct
  REGION 1..13: note = short peptide
QTNVSQSKDSDVY

SEQ ID NO: 8295 - protein, 9 aa, synthetic construct
  REGION 1..9: note = short peptide
LHNSTMYVF

SEQ ID NO: 8296 - protein, 9 aa, synthetic construct
  REGION 1..9: note = short peptide
RSRGGGYGR

SEQ ID NO: 8297 - protein, 11 aa, synthetic construct
  REGION 1..11: note = short peptide
RVYPRPPSKTY

SEQ ID NO: 8298 - protein, 9 aa, synthetic construct
  REGION 1..9: note = short peptide
GHNVSEYLL

SEQ ID NO: 8299 - protein, 9 aa, synthetic construct
  REGION 1..9: note = short peptide
KIMDQIEKY

SEQ ID NO: 8300 - protein, 11 aa, synthetic construct
  REGION 1..11: note = short peptide
QHECRSILERL

SEQ ID NO: 8301 - protein, 9 aa, synthetic construct
  REGION 1..9: note = short peptide
YSQEIENHY

SEQ ID NO: 8302 - protein, 9 aa, synthetic construct
  REGION 1..9: note = short peptide
SSCDQPLGY

SEQ ID NO: 8303 - protein, 10 aa, synthetic construct
  REGION 1..10: note = short peptide
HHCPHTPILL

SEQ ID NO: 8304 - protein, 9 aa, synthetic construct
  REGION 1..9: note = short peptide
TSCEYVSLY

SEQ ID NO: 8305 - protein, 9 aa, synthetic construct
  REGION 1..9: note = short peptide
RHCDLQVRI

SEQ ID NO: 8306 - protein, 9 aa, synthetic construct
  REGION 1..9: note = short peptide
SPMADRSMM

SEQ ID NO: 8307 - protein, 9 aa, synthetic construct
  REGION 1..9: note = short peptide
VHNRTVSSL

SEQ ID NO: 8308 - protein, 12 aa, synthetic construct
  REGION 1..12: note = short peptide
STRSVSSSSYRR

SEQ ID NO: 8309 - protein, 13 aa, synthetic construct
  REGION 1..13: note = short peptide
SPRGGGFGGRGGF

SEQ ID NO: 8310 - protein, 9 aa, synthetic construct
  REGION 1..9: note = short peptide
ALNNHTVGR

SEQ ID NO: 8311 - protein, 9 aa, synthetic construct
  REGION 1..9: note = short peptide
VLAQPQGAL

SEQ ID NO: 8312 - protein, 13 aa, synthetic construct
  REGION 1..13: note = short peptide
ASAPVSGAGNHSY

SEQ ID NO: 8313 - protein, 12 aa, synthetic construct
  REGION 1..12: note = short peptide
GPRGSPGERGEV

SEQ ID NO: 8314 - protein, 9 aa, synthetic construct
  REGION 1..9: note = short peptide
GMRPPGPQY

SEQ ID NO: 8315 - protein, 13 aa, synthetic construct
  REGION 1..13: note = short peptide
QTARKSTGGKAPR

SEQ ID NO: 8316 - protein, 13 aa, synthetic construct
  REGION 1..13: note = short peptide
QTARKSTGGKAPR

SEQ ID NO: 8317 - protein, 15 aa, synthetic construct
  REGION 1..15: note = short peptide
GKRIQYQLVDISQDN

SEQ ID NO: 8318 - protein, 9 aa, synthetic construct
  REGION 1..9: note = short peptide
PSNGSMHNY

SEQ ID NO: 8319 - protein, 9 aa, synthetic construct
  REGION 1..9: note = short peptide
WSNWSNPAY

SEQ ID NO: 8320 - protein, 9 aa, synthetic construct
  REGION 1..9: note = short peptide
SDIQSLDNY

SEQ ID NO: 8321 - protein, 10 aa, synthetic construct
  REGION 1..10: note = short peptide
GHVDPANDTF

SEQ ID NO: 8322 - protein, 9 aa, synthetic construct
  REGION 1..9: note = short peptide
KSTGGKAPR

SEQ ID NO: 8323 - protein, 9 aa, synthetic construct
  REGION 1..9: note = short peptide
KSTGGKAPR

SEQ ID NO: 8324 - protein, 10 aa, synthetic construct
  REGION 1..10: note = short peptide
RKSTGGKAPR

SEQ ID NO: 8325 - protein, 9 aa, synthetic construct
  REGION 1..9: note = short peptide
RFYNYTVCR

SEQ ID NO: 8326 - protein, 9 aa, synthetic construct
  REGION 1..9: note = short peptide
KQLATKAAR

SEQ ID NO: 8327 - protein, 10 aa, synthetic construct
  REGION 1..10: note = short peptide
SHDNTSALEL

SEQ ID NO: 8328 - protein, 9 aa, synthetic construct
  REGION 1..9: note = short peptide
SLYKEGHSK

SEQ ID NO: 8329 - protein, 9 aa, synthetic construct
  REGION 1..9: note = short peptide
THCGVPNYL

SEQ ID NO: 8330 - protein, 9 aa, synthetic construct
  REGION 1..9: note = short peptide
WHEECERYL

SEQ ID NO: 8331 - protein, 9 aa, synthetic construct
  REGION 1..9: note = short peptide
SHCSRILLL

SEQ ID NO: 8332 - protein, 9 aa, synthetic construct
  REGION 1..9: note = short peptide
SHDTMTYCL

SEQ ID NO: 8333 - protein, 10 aa, synthetic construct
  REGION 1..10: note = short peptide
KEGCYTNRMY

SEQ ID NO: 8334 - protein, 10 aa, synthetic construct
  REGION 1..10: note = short peptide
QHCPLKNPTF

SEQ ID NO: 8335 - protein, 11 aa, synthetic construct
  REGION 1..11: note = short peptide
AYVSFKPCMTR

SEQ ID NO: 8336 - protein, 8 aa, synthetic construct
  REGION 1..8: note = short peptide
TQRLLSQL

SEQ ID NO: 8337 - protein, 10 aa, synthetic construct
  REGION 1..10: note = short peptide
EHAREMCLRF

SEQ ID NO: 8338 - protein, 9 aa, synthetic construct
  REGION 1..9: note = short peptide
AHDFNSVMY

SEQ ID NO: 8339 - protein, 9 aa, synthetic construct
  REGION 1..9: note = short peptide
KMLDCSPIL

SEQ ID NO: 8340 - protein, 9 aa, synthetic construct
  REGION 1..9: note = short peptide
RTKVDDCQF

SEQ ID NO: 8341 - protein, 9 aa, synthetic construct
  REGION 1..9: note = short peptide
HHIEMACTL

SEQ ID NO: 8342 - protein, 9 aa, synthetic construct
  REGION 1..9: note = short peptide
YHCHCRIVL

SEQ ID NO: 8343 - protein, 9 aa, synthetic construct
  REGION 1..9: note = short peptide
RQTVEHCQY

SEQ ID NO: 8344 - protein, 9 aa, synthetic construct
  REGION 1..9: note = short peptide
RQNPCLVTR

SEQ ID NO: 8345 - protein, 12 aa, synthetic construct
  REGION 1..12: note = short peptide
NHILPPMDHSTI

SEQ ID NO: 8346 - protein, 9 aa, synthetic construct
  REGION 1..9: note = short peptide
GQRAGTCVL

SEQ ID NO: 8347 - protein, 10 aa, synthetic construct
  REGION 1..10: note = short peptide
STTGHCVHMR

SEQ ID NO: 8348 - protein, 9 aa, synthetic construct
  REGION 1..9: note = short peptide
VLYDCQEGK

SEQ ID NO: 8349 - protein, 9 aa, synthetic construct
  REGION 1..9: note = short peptide
VLAQPQGAL

SEQ ID NO: 8350 - protein, 9 aa, synthetic construct
  REGION 1..9: note = short peptide
SDIQSLDNY

SEQ ID NO: 8351 - protein, 12 aa, synthetic construct
  REGION 1..12: note = short peptide
VPRGTPTPRGVL

SEQ ID NO: 8352 - protein, 11 aa, synthetic construct
  REGION 1..11: note = short peptide
YVNNSIARNYY

SEQ ID NO: 8353 - protein, 10 aa, synthetic construct
  REGION 1..10: note = short peptide
KTNISHNGTY

SEQ ID NO: 8354 - protein, 10 aa, synthetic construct
  REGION 1..10: note = short peptide
SAGGHPIVQL

SEQ ID NO: 8355 - protein, 8 aa, synthetic construct
  REGION 1..8: note = short peptide
NADMSEDM

SEQ ID NO: 8356 - protein, 15 aa, synthetic construct
  REGION 1..15: note = short peptide
RGKGGKGLGKGGAKR

SEQ ID NO: 8357 - protein, 9 aa, synthetic construct
  REGION 1..9: note = short peptide
RPRGPPPPP

SEQ ID NO: 8358 - protein, 10 aa, synthetic construct
  REGION 1..10: note = short peptide
RPRPGSRRGA

SEQ ID NO: 8359 - protein, 10 aa, synthetic construct
  REGION 1..10: note = short peptide
RPGGGRGGAF

SEQ ID NO: 8360 - protein, 9 aa, synthetic construct
  REGION 1..9: note = short peptide
RYSDRFSSR

SEQ ID NO: 8361 - protein, 9 aa, synthetic construct
  REGION 1..9: note = short peptide
RTNYTIDVY

SEQ ID NO: 8362 - protein, 13 aa, synthetic construct
  REGION 1..13: note = short peptide
RTASLSNQECQLY

SEQ ID NO: 8363 - protein, 12 aa, synthetic construct
  REGION 1..12: note = short peptide
MHEAEEWYRSKF

SEQ ID NO: 8364 - protein, 11 aa, synthetic construct
  REGION 1..11: note = short peptide
MEKEETTRELL

SEQ ID NO: 8365 - protein, 10 aa, synthetic construct
  REGION 1..10: note = short peptide
LRLDTGPQSL

SEQ ID NO: 8366 - protein, 8 aa, synthetic construct
  REGION 1..8: note = short peptide
TNGPIDVY

SEQ ID NO: 8367 - protein, 11 aa, synthetic construct
  REGION 1..11: note = short peptide
LTSSAVTSVAK

SEQ ID NO: 8368 - protein, 10 aa, synthetic construct
  REGION 1..10: note = short peptide
LTSSAVKEKL

SEQ ID NO: 8369 - protein, 15 aa, synthetic construct
  REGION 1..15: note = short peptide
TEEPIKEILGAPKAH

SEQ ID NO: 8370 - protein, 9 aa, synthetic construct
  REGION 1..9: note = short peptide
SRGSRGPGR

SEQ ID NO: 8371 - protein, 12 aa, synthetic construct
  REGION 1..12: note = short peptide
SPRYPGGPRPPL

SEQ ID NO: 8372 - protein, 15 aa, synthetic construct
  REGION 1..15: note = short peptide
TAYRVSKQAQLSAPT

SEQ ID NO: 8373 - protein, 9 aa, synthetic construct
  REGION 1..9: note = short peptide
MPPNSTYDY

SEQ ID NO: 8374 - protein, 10 aa, synthetic construct
  REGION 1..10: note = short peptide
STTGHCVHMR

SEQ ID NO: 8375 - protein, 10 aa, synthetic construct
  REGION 1..10: note = short peptide
HPRGAGRGSL

SEQ ID NO: 8376 - protein, 9 aa, synthetic construct
  REGION 1..9: note = short peptide
GGYRPVWNR

SEQ ID NO: 8377 - protein, 12 aa, synthetic construct
  REGION 1..12: note = short peptide
AVESRVTQEEIK

SEQ ID NO: 8378 - protein, 14 aa, synthetic construct
  REGION 1..14: note = short peptide
ATDPDLGTNGTVKY

SEQ ID NO: 8379 - protein, 9 aa, synthetic construct
  REGION 1..9: note = short peptide
ASKGLQDLK

SEQ ID NO: 8380 - protein, 9 aa, synthetic construct
  REGION 1..9: note = short peptide
AENTSHKSY

SEQ ID NO: 8381 - protein, 15 aa, synthetic construct
  REGION 1..15: note = short peptide
FSASYKTLPRGTAKE

SEQ ID NO: 8382 - protein, 9 aa, synthetic construct
  REGION 1..9: note = short peptide
FPREPRPKL

SEQ ID NO: 8383 - protein, 9 aa, synthetic construct
  REGION 1..9: note = short peptide
FLLNHTRQI

SEQ ID NO: 8384 - protein, 9 aa, synthetic construct
  REGION 1..9: note = short peptide
DHNRTVVRF

SEQ ID NO: 8385 - protein, 15 aa, synthetic construct
  REGION 1..15: note = short peptide
DVKGIKVQSVDKQYN

SEQ ID NO: 8386 - protein, 9 aa, synthetic construct
  REGION 1..9: note = short peptide
KPINDTHSL

SEQ ID NO: 8387 - protein, 11 aa, synthetic construct
  REGION 1..11: note = short peptide
IMKPACPLFVR

SEQ ID NO: 8388 - protein, 10 aa, synthetic construct
  REGION 1..10: note = short peptide
TDQVIQNEMP

SEQ ID NO: 8389 - protein, 9 aa, synthetic construct
  REGION 1..9: note = short peptide
RVDCTPLMY

SEQ ID NO: 8390 - protein, 15 aa, synthetic construct
  REGION 1..15: note = short peptide
LEFRSGKVAFRDCEG

SEQ ID NO: 8391 - protein, 9 aa, synthetic construct
  REGION 1..9: note = short peptide
SPDAKIFCL

SEQ ID NO: 8392 - protein, 10 aa, synthetic construct
  REGION 1..10: note = short peptide
EEHCRKVNEY

SEQ ID NO: 8393 - protein, 10 aa, synthetic construct
  REGION 1..10: note = short peptide
QHNDECKHLL

SEQ ID NO: 8394 - protein, 9 aa, synthetic construct
  REGION 1..9: note = short peptide
RQRVDSCSY

SEQ ID NO: 8395 - protein, 12 aa, synthetic construct
  REGION 1..12: note = short peptide
FSCIVTHEIDRY

SEQ ID NO: 8396 - protein, 9 aa, synthetic construct
  REGION 1..9: note = short peptide
FTDCYKCFY

SEQ ID NO: 8397 - protein, 9 aa, synthetic construct
  REGION 1..9: note = short peptide
RQNPSRCSV

SEQ ID NO: 8398 - protein, 9 aa, synthetic construct
  REGION 1..9: note = short peptide
YHVHCIDRW

SEQ ID NO: 8399 - protein, 9 aa, synthetic construct
  REGION 1..9: note = short peptide
RMKCTVTNR

SEQ ID NO: 8400 - protein, 9 aa, synthetic construct
  REGION 1..9: note = short peptide
VVDSCSMLY

SEQ ID NO: 8401 - protein, 9 aa, synthetic construct
  REGION 1..9: note = short peptide
ATRISIQCR

SEQ ID NO: 8402 - protein, 9 aa, synthetic construct
  REGION 1..9: note = short peptide
HTEVDNCRY

SEQ ID NO: 8403 - protein, 9 aa, synthetic construct
  REGION 1..9: note = short peptide
IQNKHLCHR

SEQ ID NO: 8404 - protein, 10 aa, synthetic construct
  REGION 1..10: note = short peptide
SAGGHPIVQL

SEQ ID NO: 8405 - protein, 10 aa, synthetic construct
  REGION 1..10: note = short peptide
LRLDTGPQSL

SEQ ID NO: 8406 - protein, 15 aa, synthetic construct
  REGION 1..15: note = short peptide
DVKGIKVQSVDKQYN

SEQ ID NO: 8407 - protein, 10 aa, synthetic construct
  REGION 1..10: note = short peptide
HEAVTIKCTF

SEQ ID NO: 8408 - protein, 8 aa, synthetic construct
  REGION 1..8: note = short peptide
TKEICVVR

SEQ ID NO: 8409 - protein, 11 aa, synthetic construct
  REGION 1..11: note = short peptide
RPRQNSLHGSF

SEQ ID NO: 8410 - protein, 10 aa, synthetic construct
  REGION 1..10: note = short peptide
TMHDHNTLLK

SEQ ID NO: 8411 - protein, 11 aa, synthetic construct
  REGION 1..11: note = short peptide
HGYSHESLYHR

SEQ ID NO: 8412 - protein, 15 aa, synthetic construct
  REGION 1..15: note = short peptide
RNRGAGGFGGGGGTR

SEQ ID NO: 8413 - protein, 13 aa, synthetic construct
  REGION 1..13: note = short peptide
CTKPQESPGAPSR

SEQ ID NO: 8414 - protein, 13 aa, synthetic construct
  REGION 1..13: note = short peptide
CTKPQESPGAPSR

SEQ ID NO: 8415 - protein, 9 aa, synthetic construct
  REGION 1..9: note = short peptide
RSLTVLRRC

SEQ ID NO: 8416 - protein, 11 aa, synthetic construct
  REGION 1..11: note = short peptide
RSKSPASTSSV

SEQ ID NO: 8417 - protein, 9 aa, synthetic construct
  REGION 1..9: note = short peptide
KVANLTFVV

SEQ ID NO: 8418 - protein, 10 aa, synthetic construct
  REGION 1..10: note = short peptide
RSRSFDYNYR

SEQ ID NO: 8419 - protein, 11 aa, synthetic construct
  REGION 1..11: note = short peptide
TFRPAAMLVER

SEQ ID NO: 8420 - protein, 15 aa, synthetic construct
  REGION 1..15: note = short peptide
TGDAYVILKTVQLRN

SEQ ID NO: 8421 - protein, 12 aa, synthetic construct
  REGION 1..12: note = short peptide
THNTTLNGKDTL

SEQ ID NO: 8422 - protein, 11 aa, synthetic construct
  REGION 1..11: note = short peptide
AYLGNFSGRTR

SEQ ID NO: 8423 - protein, 9 aa, synthetic construct
  REGION 1..9: note = short peptide
RSAAKFYRR

SEQ ID NO: 8424 - protein, 11 aa, synthetic construct
  REGION 1..11: note = short peptide
RRSYVSSGEMM

SEQ ID NO: 8425 - protein, 9 aa, synthetic construct
  REGION 1..9: note = short peptide
GSNVSPNQY

SEQ ID NO: 8426 - protein, 9 aa, synthetic construct
  REGION 1..9: note = short peptide
HSHSPMSTR

SEQ ID NO: 8427 - protein, 15 aa, synthetic construct
  REGION 1..15: note = short peptide
HSKIIIIKKGHAKDS

SEQ ID NO: 8428 - protein, 10 aa, synthetic construct
  REGION 1..10: note = short peptide
TSRSTARPNG

SEQ ID NO: 8429 - protein, 13 aa, synthetic construct
  REGION 1..13: note = short peptide
QTARKSTGGKAPR

SEQ ID NO: 8430 - protein, 11 aa, synthetic construct
  REGION 1..11: note = short peptide
RARKDGAPKDR

SEQ ID NO: 8431 - protein, 9 aa, synthetic construct
  REGION 1..9: note = short peptide
HSDLITGVY

SEQ ID NO: 8432 - protein, 9 aa, synthetic construct
  REGION 1..9: note = short peptide
IEHGIITNW

SEQ ID NO: 8433 - protein, 9 aa, synthetic construct
  REGION 1..9: note = short peptide
AQSRDGGNP

SEQ ID NO: 8434 - protein, 10 aa, synthetic construct
  REGION 1..10: note = short peptide
AQNPANMSKY

SEQ ID NO: 8435 - protein, 9 aa, synthetic construct
  REGION 1..9: note = short peptide
ATAVAHCKR

SEQ ID NO: 8436 - protein, 10 aa, synthetic construct
  REGION 1..10: note = short peptide
RKEKSRSPLR

SEQ ID NO: 8437 - protein, 13 aa, synthetic construct
  REGION 1..13: note = short peptide
RTMNASLAQQLCR

SEQ ID NO: 8438 - protein, 11 aa, synthetic construct
  REGION 1..11: note = short peptide
TMRPASSQVPR

SEQ ID NO: 8439 - protein, 11 aa, synthetic construct
  REGION 1..11: note = short peptide
RLGGNRPTNNR

SEQ ID NO: 8440 - protein, 10 aa, synthetic construct
  REGION 1..10: note = short peptide
ASHLPTLEKL

SEQ ID NO: 8441 - protein, 13 aa, synthetic construct
  REGION 1..13: note = short peptide
TQVGPGPQILDDP

SEQ ID NO: 8442 - protein, 10 aa, synthetic construct
  REGION 1..10: note = short peptide
HQDPSTNQTW

SEQ ID NO: 8443 - protein, 9 aa, synthetic construct
  REGION 1..9: note = short peptide
KYYKYILTR

SEQ ID NO: 8444 - protein, 12 aa, synthetic construct
  REGION 1..12: note = short peptide
RGMDRGGFGGGR

SEQ ID NO: 8445 - protein, 8 aa, synthetic construct
  REGION 1..8: note = short peptide
REVKIHNR

SEQ ID NO: 8446 - protein, 9 aa, synthetic construct
  REGION 1..9: note = short peptide
RTNYTIDVY

SEQ ID NO: 8447 - protein, 10 aa, synthetic construct
  REGION 1..10: note = short peptide
FHDKYGNAVL

SEQ ID NO: 8448 - protein, 10 aa, synthetic construct
  REGION 1..10: note = short peptide
FHNDTKVVFL

SEQ ID NO: 8449 - protein, 9 aa, synthetic construct
  REGION 1..9: note = short peptide
FHNGTVVTY

SEQ ID NO: 8450 - protein, 9 aa, synthetic construct
  REGION 1..9: note = short peptide
STDNFNCKY

SEQ ID NO: 8451 - protein, 10 aa, synthetic construct
  REGION 1..10: note = short peptide
STDVKGCSMY

SEQ ID NO: 8452 - protein, 11 aa, synthetic construct
  REGION 1..11: note = short peptide
STRSVSSSSYR

SEQ ID NO: 8453 - protein, 12 aa, synthetic construct
  REGION 1..12: note = short peptide
DTGAKGEPGPVG

SEQ ID NO: 8454 - protein, 8 aa, synthetic construct
  REGION 1..8: note = short peptide
SHSKNMTI

SEQ ID NO: 8455 - protein, 10 aa, synthetic construct
  REGION 1..10: note = short peptide
STTGHCVHMR

SEQ ID NO: 8456 - protein, 10 aa, synthetic construct
  REGION 1..10: note = short peptide
STTGHCVHMR

SEQ ID NO: 8457 - protein, 12 aa, synthetic construct
  REGION 1..12: note = short peptide
SPRPSPKQSPRN

SEQ ID NO: 8458 - protein, 15 aa, synthetic construct
  REGION 1..15: note = short peptide
EKKLSQVLNELQVSH

SEQ ID NO: 8459 - protein, 10 aa, synthetic construct
  REGION 1..10: note = short peptide
EELRAHVRKY

SEQ ID NO: 8460 - protein, 14 aa, synthetic construct
  REGION 1..14: note = short peptide
SRQFSSRSGYRSGG

SEQ ID NO: 8461 - protein, 8 aa, synthetic construct
  REGION 1..8: note = short peptide
SRGGFSSR

SEQ ID NO: 8462 - protein, 14 aa, synthetic construct
  REGION 1..14: note = short peptide
SQATNYGEDLTKNH

SEQ ID NO: 8463 - protein, 9 aa, synthetic construct
  REGION 1..9: note = short peptide
SPVLRNFTF

SEQ ID NO: 8464 - protein, 9 aa, synthetic construct
  REGION 1..9: note = short peptide
EHNSTTSTF

SEQ ID NO: 8465 - protein, 13 aa, synthetic construct
  REGION 1..13: note = short peptide
ESRAELTSDKDMY

SEQ ID NO: 8466 - protein, 9 aa, synthetic construct
  REGION 1..9: note = short peptide
EEAEIIRKY

SEQ ID NO: 8467 - protein, 9 aa, synthetic construct
  REGION 1..9: note = short peptide
GHCLVTPEI

SEQ ID NO: 8468 - protein, 9 aa, synthetic construct
  REGION 1..9: note = short peptide
RYNPYLKRR

SEQ ID NO: 8469 - protein, 10 aa, synthetic construct
  REGION 1..10: note = short peptide
RYIPPHLRNR

SEQ ID NO: 8470 - protein, 15 aa, synthetic construct
  REGION 1..15: note = short peptide
KQDAFQGQEAAVMMD

SEQ ID NO: 8471 - protein, 9 aa, synthetic construct
  REGION 1..9: note = short peptide
RVYTYIQSR

SEQ ID NO: 8472 - protein, 8 aa, synthetic construct
  REGION 1..8: note = short peptide
KPSLKDIK

SEQ ID NO: 8473 - protein, 9 aa, synthetic construct
  REGION 1..9: note = short peptide
TEQKPIQDP

SEQ ID NO: 8474 - protein, 9 aa, synthetic construct
  REGION 1..9: note = short peptide
IHCSVNESL

SEQ ID NO: 8475 - protein, 9 aa, synthetic construct
  REGION 1..9: note = short peptide
RVWKREKDR

SEQ ID NO: 8476 - protein, 9 aa, synthetic construct
  REGION 1..9: note = short peptide
TANTSVLGY

SEQ ID NO: 8477 - protein, 10 aa, synthetic construct
  REGION 1..10: note = short peptide
KVYTKSSHLK

SEQ ID NO: 8478 - protein, 9 aa, synthetic construct
  REGION 1..9: note = short peptide
SENELKKAY

SEQ ID NO: 8479 - protein, 10 aa, synthetic construct
  REGION 1..10: note = short peptide
KQKSPDGVHR

SEQ ID NO: 8480 - protein, 10 aa, synthetic construct
  REGION 1..10: note = short peptide
TAALAVAPGP

SEQ ID NO: 8481 - protein, 15 aa, synthetic construct
  REGION 1..15: note = short peptide
SERKMDPAEEDTNVY

SEQ ID NO: 8482 - protein, 11 aa, synthetic construct
  REGION 1..11: note = short peptide
SEKDLNGSSHW

SEQ ID NO: 8483 - protein, 10 aa, synthetic construct
  REGION 1..10: note = short peptide
YLDKNLTVSV

SEQ ID NO: 8484 - protein, 9 aa, synthetic construct
  REGION 1..9: note = short peptide
MSSPCHIEM

SEQ ID NO: 8485 - protein, 11 aa, synthetic construct
  REGION 1..11: note = short peptide
ALRPSTSRSLY

SEQ ID NO: 8486 - protein, 10 aa, synthetic construct
  REGION 1..10: note = short peptide
ALRDNSTMGY

SEQ ID NO: 8487 - protein, 9 aa, synthetic construct
  REGION 1..9: note = short peptide
YPNFKDIRY

SEQ ID NO: 8488 - protein, 10 aa, synthetic construct
  REGION 1..10: note = short peptide
VHSNGSVAYF

SEQ ID NO: 8489 - protein, 9 aa, synthetic construct
  REGION 1..9: note = short peptide
KLLPSVVLK

SEQ ID NO: 8490 - protein, 11 aa, synthetic construct
  REGION 1..11: note = short peptide
KTITGKTFSSR

SEQ ID NO: 8491 - protein, 11 aa, synthetic construct
  REGION 1..11: note = short peptide
VPRGPTATARF

SEQ ID NO: 8492 - protein, 8 aa, synthetic construct
  REGION 1..8: note = short peptide
KKINNLNK

SEQ ID NO: 8493 - protein, 9 aa, synthetic construct
  REGION 1..9: note = short peptide
KHNNDTQHI

SEQ ID NO: 8494 - protein, 15 aa, synthetic construct
  REGION 1..15: note = short peptide
YARFNKIKKLTAKDF

SEQ ID NO: 8495 - protein, 12 aa, synthetic construct
  REGION 1..12: note = short peptide
KKFACNGTVIEH

SEQ ID NO: 8496 - protein, 9 aa, synthetic construct
  REGION 1..9: note = short peptide
MEKEETTRE

SEQ ID NO: 8497 - protein, 10 aa, synthetic construct
  REGION 1..10: note = short peptide
KLERANSQLK

SEQ ID NO: 8498 - protein, 10 aa, synthetic construct
  REGION 1..10: note = short peptide
YHSDDYIKFL

SEQ ID NO: 8499 - protein, 9 aa, synthetic construct
  REGION 1..9: note = short peptide
KHDNVSILF

SEQ ID NO: 8500 - protein, 10 aa, synthetic construct
  REGION 1..10: note = short peptide
YSDRSSGGSY

SEQ ID NO: 8501 - protein, 9 aa, synthetic construct
  REGION 1..9: note = short peptide
PANPAPITQ

SEQ ID NO: 8502 - protein, 8 aa, synthetic construct
  REGION 1..8: note = short peptide
KNEMNVML

SEQ ID NO: 8503 - protein, 12 aa, synthetic construct
  REGION 1..12: note = short peptide
LRVAPEEHPVLL

SEQ ID NO: 8504 - protein, 11 aa, synthetic construct
  REGION 1..11: note = short peptide
AAGDGDVKLGT

SEQ ID NO: 8505 - protein, 14 aa, synthetic construct
  REGION 1..14: note = short peptide
AAQKDQQKDAEAEG

SEQ ID NO: 8506 - protein, 15 aa, synthetic construct
  REGION 1..15: note = short peptide
LRPYPKEEVGQYLKK

SEQ ID NO: 8507 - protein, 15 aa, synthetic construct
  REGION 1..15: note = short peptide
PEFLEDPSVLTKDKL

SEQ ID NO: 8508 - protein, 9 aa, synthetic construct
  REGION 1..9: note = short peptide
NSCARSDLY

SEQ ID NO: 8509 - protein, 13 aa, synthetic construct
  REGION 1..13: note = short peptide
NRGDSTFESKSYK

SEQ ID NO: 8510 - protein, 9 aa, synthetic construct
  REGION 1..9: note = short peptide
LSNLTCNNY

SEQ ID NO: 8511 - protein, 9 aa, synthetic construct
  REGION 1..9: note = short peptide
KLTNNSNQF

SEQ ID NO: 8512 - protein, 9 aa, synthetic construct
  REGION 1..9: note = short peptide
TYDYTHCLC

SEQ ID NO: 8513 - protein, 10 aa, synthetic construct
  REGION 1..10: note = short peptide
APDHPAPGPA

SEQ ID NO: 8514 - protein, 9 aa, synthetic construct
  REGION 1..9: note = short peptide
RVYCKKVDR

SEQ ID NO: 8515 - protein, 11 aa, synthetic construct
  REGION 1..11: note = short peptide
RPRQNSLHGSF

SEQ ID NO: 8516 - protein, 11 aa, synthetic construct
  REGION 1..11: note = short peptide
RTKPGICENGR

SEQ ID NO: 8517 - protein, 9 aa, synthetic construct
  REGION 1..9: note = short peptide
RTNTAYQCF

SEQ ID NO: 8518 - protein, 10 aa, synthetic construct
  REGION 1..10: note = short peptide
RQFQRGTCSR

SEQ ID NO: 8519 - protein, 9 aa, synthetic construct
  REGION 1..9: note = short peptide
NSCANPILY

SEQ ID NO: 8520 - protein, 9 aa, synthetic construct
  REGION 1..9: note = short peptide
NSCARTDLY

SEQ ID NO: 8521 - protein, 10 aa, synthetic construct
  REGION 1..10: note = short peptide
NSCWSKDAEY

SEQ ID NO: 8522 - protein, 12 aa, synthetic construct
  REGION 1..12: note = short peptide
SPGSHHANGNKL

SEQ ID NO: 8523 - protein, 8 aa, synthetic construct
  REGION 1..8: note = short peptide
MEKKGCYW

SEQ ID NO: 8524 - protein, 11 aa, synthetic construct
  REGION 1..11: note = short peptide
SPCISGTTHTL

SEQ ID NO: 8525 - protein, 9 aa, synthetic construct
  REGION 1..9: note = short peptide
MHHQDCLLF

SEQ ID NO: 8526 - protein, 10 aa, synthetic construct
  REGION 1..10: note = short peptide
NDTDHYFLRY

SEQ ID NO: 8527 - protein, 8 aa, synthetic construct
  REGION 1..8: note = short peptide
SLFRPLCK

SEQ ID NO: 8528 - protein, 9 aa, synthetic construct
  REGION 1..9: note = short peptide
QSDCSCSTV

SEQ ID NO: 8529 - protein, 11 aa, synthetic construct
  REGION 1..11: note = short peptide
SERECQGNGVW

SEQ ID NO: 8530 - protein, 9 aa, synthetic construct
  REGION 1..9: note = short peptide
RALDTNYCF

SEQ ID NO: 8531 - protein, 10 aa, synthetic construct
  REGION 1..10: note = short peptide
SHDCSSGTYF

SEQ ID NO: 8532 - protein, 9 aa, synthetic construct
  REGION 1..9: note = short peptide
SHHNGDFCF

SEQ ID NO: 8533 - protein, 11 aa, synthetic construct
  REGION 1..11: note = short peptide
QEQCPNITRIY

SEQ ID NO: 8534 - protein, 9 aa, synthetic construct
  REGION 1..9: note = short peptide
SFLKRLICR

SEQ ID NO: 8535 - protein, 11 aa, synthetic construct
  REGION 1..11: note = short peptide
KVLGACKLLLR

SEQ ID NO: 8536 - protein, 9 aa, synthetic construct
  REGION 1..9: note = short peptide
HTQEMRFLR

SEQ ID NO: 8537 - protein, 11 aa, synthetic construct
  REGION 1..11: note = short peptide
HTINMEECRLR

SEQ ID NO: 8538 - protein, 10 aa, synthetic construct
  REGION 1..10: note = short peptide
HHNCSESLEL

SEQ ID NO: 8539 - protein, 11 aa, synthetic construct
  REGION 1..11: note = short peptide
APHRPAPALLC

SEQ ID NO: 8540 - protein, 11 aa, synthetic construct
  REGION 1..11: note = short peptide
IMKPACPLFVR

SEQ ID NO: 8541 - protein, 9 aa, synthetic construct
  REGION 1..9: note = short peptide
EECGKAFKW

SEQ ID NO: 8542 - protein, 12 aa, synthetic construct
  REGION 1..12: note = short peptide
EEGAACKDGRLW

SEQ ID NO: 8543 - protein, 11 aa, synthetic construct
  REGION 1..11: note = short peptide
VEQCFGDGLHW

SEQ ID NO: 8544 - protein, 9 aa, synthetic construct
  REGION 1..9: note = short peptide
FMCETALHY

SEQ ID NO: 8545 - protein, 9 aa, synthetic construct
  REGION 1..9: note = short peptide
ASRCAHVAR

SEQ ID NO: 8546 - protein, 9 aa, synthetic construct
  REGION 1..9: note = short peptide
GPRACAPLL

SEQ ID NO: 8547 - protein, 9 aa, synthetic construct
  REGION 1..9: note = short peptide
TECGKSFSW

SEQ ID NO: 8548 - protein, 9 aa, synthetic construct
  REGION 1..9: note = short peptide
TDRQIDQFL

SEQ ID NO: 8549 - protein, 10 aa, synthetic construct
  REGION 1..10: note = short peptide
KPCGLFGKEL

SEQ ID NO: 8550 - protein, 10 aa, synthetic construct
  REGION 1..10: note = short peptide
KVKCPVFVVR

SEQ ID NO: 8551 - protein, 10 aa, synthetic construct
  REGION 1..10: note = short peptide
KSACKSSDLW

SEQ ID NO: 8552 - protein, 9 aa, synthetic construct
  REGION 1..9: note = short peptide
VSDSSCSSL

SEQ ID NO: 8553 - protein, 11 aa, synthetic construct
  REGION 1..11: note = short peptide
DECTEAEGRHW

SEQ ID NO: 8554 - protein, 9 aa, synthetic construct
  REGION 1..9: note = short peptide
THGCIVSTI

SEQ ID NO: 8555 - protein, 9 aa, synthetic construct
  REGION 1..9: note = short peptide
RVFTEGTCK

SEQ ID NO: 8556 - protein, 9 aa, synthetic construct
  REGION 1..9: note = short peptide
RVKEILHCH

SEQ ID NO: 8557 - protein, 12 aa, synthetic construct
  REGION 1..12: note = short peptide
RVRDNICGALAR

SEQ ID NO: 8558 - protein, 11 aa, synthetic construct
  REGION 1..11: note = short peptide
RVYDISRWAQR

SEQ ID NO: 8559 - protein, 9 aa, synthetic construct
  REGION 1..9: note = short peptide
RYQEVCRQR

SEQ ID NO: 8560 - protein, 9 aa, synthetic construct
  REGION 1..9: note = short peptide
RYSSAFCNK

SEQ ID NO: 8561 - protein, 9 aa, synthetic construct
  REGION 1..9: note = short peptide
RYVYCVTQR

SEQ ID NO: 8562 - protein, 11 aa, synthetic construct
  REGION 1..11: note = short peptide
RTRAELDTVCR

SEQ ID NO: 8563 - protein, 9 aa, synthetic construct
  REGION 1..9: note = short peptide
RLHQTLCSR

SEQ ID NO: 8564 - protein, 9 aa, synthetic construct
  REGION 1..9: note = short peptide
KTHPEVCGR

SEQ ID NO: 8565 - protein, 11 aa, synthetic construct
  REGION 1..11: note = short peptide
KSKEIDKCLSR

SEQ ID NO: 8566 - protein, 8 aa, synthetic construct
  REGION 1..8: note = short peptide
HVDECVEF

SEQ ID NO: 8567 - protein, 9 aa, synthetic construct
  REGION 1..9: note = short peptide
KGNFHAVYR

SEQ ID NO: 8568 - protein, 12 aa, synthetic construct
  REGION 1..12: note = short peptide
EEDPIHLRCHSW

SEQ ID NO: 8569 - protein, 9 aa, synthetic construct
  REGION 1..9: note = short peptide
KGCERRFAR

SEQ ID NO: 8570 - protein, 9 aa, synthetic construct
  REGION 1..9: note = short peptide
HLYGKCLAV

SEQ ID NO: 8571 - protein, 10 aa, synthetic construct
  REGION 1..10: note = short peptide
HEAVTIKCTF

SEQ ID NO: 8572 - protein, 9 aa, synthetic construct
  REGION 1..9: note = short peptide
ATAVAHCKR

SEQ ID NO: 8573 - protein, 13 aa, synthetic construct
  REGION 1..13: note = short peptide
RTMNASLAQQLCR

SEQ ID NO: 8574 - protein, 13 aa, synthetic construct
  REGION 1..13: note = short peptide
TQVGPGPQILDDP

SEQ ID NO: 8575 - protein, 9 aa, synthetic construct
  REGION 1..9: note = short peptide
STDNFNCKY

SEQ ID NO: 8576 - protein, 10 aa, synthetic construct
  REGION 1..10: note = short peptide
STTGHCVHMR

SEQ ID NO: 8577 - protein, 10 aa, synthetic construct
  REGION 1..10: note = short peptide
STTGHCVHMR

SEQ ID NO: 8578 - protein, 9 aa, synthetic construct
  REGION 1..9: note = short peptide
GHCLVTPEI

SEQ ID NO: 8579 - protein, 9 aa, synthetic construct
  REGION 1..9: note = short peptide
TEQKPIQDP

SEQ ID NO: 8580 - protein, 8 aa, synthetic construct
  REGION 1..8: note = short peptide
KNEMNVML

SEQ ID NO: 8581 - protein, 9 aa, synthetic construct
  REGION 1..9: note = short peptide
NSCARSDLY

SEQ ID NO: 8582 - protein, 11 aa, synthetic construct
  REGION 1..11: note = short peptide
QEQCPNITRIY

SEQ ID NO: 8583 - protein, 11 aa, synthetic construct
  REGION 1..11: note = short peptide
QEQCPNITRIY

SEQ ID NO: 8584 - protein, 10 aa, synthetic construct
  REGION 1..10: note = short peptide
HHNCSESLEL

SEQ ID NO: 8585 - protein, 10 aa, synthetic construct
  REGION 1..10: note = short peptide
HHNCSESLEL

SEQ ID NO: 8586 - protein, 11 aa, synthetic construct
  REGION 1..11: note = short peptide
KVGNNTIHVHR

SEQ ID NO: 8587 - protein, 9 aa, synthetic construct
  REGION 1..9: note = short peptide
EGAGGLGDM

SEQ ID NO: 8588 - protein, 9 aa, synthetic construct
  REGION 1..9: note = short peptide
YVYEYPSRY

SEQ ID NO: 8589 - protein, 8 aa, synthetic construct
  REGION 1..8: note = short peptide
AEEQVNRS

SEQ ID NO: 8590 - protein, 8 aa, synthetic construct
  REGION 1..8: note = short peptide
YYRNYYGY

SEQ ID NO: 8591 - protein, 14 aa, synthetic construct
  REGION 1..14: note = short peptide
SREMQDVDLAEVKP

SEQ ID NO: 8592 - protein, 10 aa, synthetic construct
  REGION 1..10: note = short peptide
YYRYPTGESY

SEQ ID NO: 8593 - protein, 8 aa, synthetic construct
  REGION 1..8: note = short peptide
DPVKGRGI

SEQ ID NO: 8594 - protein, 11 aa, synthetic construct
  REGION 1..11: note = short peptide
YSAGRGIYSRY

SEQ ID NO: 8595 - protein, 11 aa, synthetic construct
  REGION 1..11: note = short peptide
STRSVSSSSYR

SEQ ID NO: 8596 - protein, 10 aa, synthetic construct
  REGION 1..10: note = short peptide
KTADGKCAYR

SEQ ID NO: 8597 - protein, 13 aa, synthetic construct
  REGION 1..13: note = short peptide
STGPTAATGSNRR

SEQ ID NO: 8598 - protein, 10 aa, synthetic construct
  REGION 1..10: note = short peptide
YQKKFKNSTY

SEQ ID NO: 8599 - protein, 13 aa, synthetic construct
  REGION 1..13: note = short peptide
STLEHGTSLKTLY

SEQ ID NO: 8600 - protein, 11 aa, synthetic construct
  REGION 1..11: note = short peptide
YSDLNTQRPYY

SEQ ID NO: 8601 - protein, 10 aa, synthetic construct
  REGION 1..10: note = short peptide
YSDRSSGGSY

SEQ ID NO: 8602 - protein, 8 aa, synthetic construct
  REGION 1..8: note = short peptide
YTDATSKY

SEQ ID NO: 8603 - protein, 9 aa, synthetic construct
  REGION 1..9: note = short peptide
SVSSPTVGK

SEQ ID NO: 8604 - protein, 15 aa, synthetic construct
  REGION 1..15: note = short peptide
DTKIILETKSKTIYK

SEQ ID NO: 8605 - protein, 11 aa, synthetic construct
  REGION 1..11: note = short peptide
EDAELGTHIAL

SEQ ID NO: 8606 - protein, 9 aa, synthetic construct
  REGION 1..9: note = short peptide
SVFKSARQK

SEQ ID NO: 8607 - protein, 10 aa, synthetic construct
  REGION 1..10: note = short peptide
SSDNATLTHY

SEQ ID NO: 8608 - protein, 12 aa, synthetic construct
  REGION 1..12: note = short peptide
VEDAMNITRKLW

SEQ ID NO: 8609 - protein, 9 aa, synthetic construct
  REGION 1..9: note = short peptide
TPDNDIKDY

SEQ ID NO: 8610 - protein, 15 aa, synthetic construct
  REGION 1..15: note = short peptide
VHNDAQSFDYDHDAF

SEQ ID NO: 8611 - protein, 11 aa, synthetic construct
  REGION 1..11: note = short peptide
ALYNNSFYTRK

SEQ ID NO: 8612 - protein, 9 aa, synthetic construct
  REGION 1..9: note = short peptide
VHNRTVSSL

SEQ ID NO: 8613 - protein, 11 aa, synthetic construct
  REGION 1..11: note = short peptide
ALRPSTSRSLY

SEQ ID NO: 8614 - protein, 11 aa, synthetic construct
  REGION 1..11: note = short peptide
VINETSQHHDD

SEQ ID NO: 8615 - protein, 9 aa, synthetic construct
  REGION 1..9: note = short peptide
VFNEKGWNY

SEQ ID NO: 8616 - protein, 9 aa, synthetic construct
  REGION 1..9: note = short peptide
ATEDSQRYK

SEQ ID NO: 8617 - protein, 12 aa, synthetic construct
  REGION 1..12: note = short peptide
TTKTADGKCAYR

SEQ ID NO: 8618 - protein, 13 aa, synthetic construct
  REGION 1..13: note = short peptide
TTDSSYGQNYSGY

SEQ ID NO: 8619 - protein, 9 aa, synthetic construct
  REGION 1..9: note = short peptide
TVLENSTSY

SEQ ID NO: 8620 - protein, 10 aa, synthetic construct
  REGION 1..10: note = short peptide
AQYDGKGVGL

SEQ ID NO: 8621 - protein, 9 aa, synthetic construct
  REGION 1..9: note = short peptide
TRDSLLIHL

SEQ ID NO: 8622 - protein, 9 aa, synthetic construct
  REGION 1..9: note = short peptide
TSDKPGSPY

SEQ ID NO: 8623 - protein, 14 aa, synthetic construct
  REGION 1..14: note = short peptide
APQSKFGLPQAQQP

SEQ ID NO: 8624 - protein, 11 aa, synthetic construct
  REGION 1..11: note = short peptide
TYGKIWEGSSK

SEQ ID NO: 8625 - protein, 12 aa, synthetic construct
  REGION 1..12: note = short peptide
VTETMGINGSAY

SEQ ID NO: 8626 - protein, 10 aa, synthetic construct
  REGION 1..10: note = short peptide
TGAKKSNKPN

SEQ ID NO: 8627 - protein, 9 aa, synthetic construct
  REGION 1..9: note = short peptide
TELIGRPVM

SEQ ID NO: 8628 - protein, 13 aa, synthetic construct
  REGION 1..13: note = short peptide
TELGKLPAGGVLY

SEQ ID NO: 8629 - protein, 12 aa, synthetic construct
  REGION 1..12: note = short peptide
TAIPAVLPAASP

SEQ ID NO: 8630 - protein, 9 aa, synthetic construct
  REGION 1..9: note = short peptide
TANGTPKVY

SEQ ID NO: 8631 - protein, 9 aa, synthetic construct
  REGION 1..9: note = short peptide
VVYVIDSCK

SEQ ID NO: 8632 - protein, 9 aa, synthetic construct
  REGION 1..9: note = short peptide
TALHLQTSL

SEQ ID NO: 8633 - protein, 12 aa, synthetic construct
  REGION 1..12: note = short peptide
TAGQSGLYSPQY

SEQ ID NO: 8634 - protein, 9 aa, synthetic construct
  REGION 1..9: note = short peptide
KVFSGKSER

SEQ ID NO: 8635 - protein, 9 aa, synthetic construct
  REGION 1..9: note = short peptide
KTDRKEFVR

SEQ ID NO: 8636 - protein, 15 aa, synthetic construct
  REGION 1..15: note = short peptide
VVKTDIQIALPSGCY

SEQ ID NO: 8637 - protein, 10 aa, synthetic construct
  REGION 1..10: note = short peptide
KVFGGTVHKK

SEQ ID NO: 8638 - protein, 12 aa, synthetic construct
  REGION 1..12: note = short peptide
VLSPADKTNVKA

SEQ ID NO: 8639 - protein, 11 aa, synthetic construct
  REGION 1..11: note = short peptide
VMADPKGKAYR

SEQ ID NO: 8640 - protein, 9 aa, synthetic construct
  REGION 1..9: note = short peptide
THSKANHSL

SEQ ID NO: 8641 - protein, 9 aa, synthetic construct
  REGION 1..9: note = short peptide
VLCPPPVKK

SEQ ID NO: 8642 - protein, 10 aa, synthetic construct
  REGION 1..10: note = short peptide
TKHKTILEAR

SEQ ID NO: 8643 - protein, 11 aa, synthetic construct
  REGION 1..11: note = short peptide
AHNMTMPNKLL

SEQ ID NO: 8644 - protein, 9 aa, synthetic construct
  REGION 1..9: note = short peptide
VPNSSFTSL

SEQ ID NO: 8645 - protein, 9 aa, synthetic construct
  REGION 1..9: note = short peptide
THISPNAIF

SEQ ID NO: 8646 - protein, 12 aa, synthetic construct
  REGION 1..12: note = short peptide
THEEHHAAKTLG

SEQ ID NO: 8647 - protein, 10 aa, synthetic construct
  REGION 1..10: note = short peptide
VPAELNGSMY

SEQ ID NO: 8648 - protein, 8 aa, synthetic construct
  REGION 1..8: note = short peptide
KALAQGYR

SEQ ID NO: 8649 - protein, 9 aa, synthetic construct
  REGION 1..9: note = short peptide
KAFQATQQK

SEQ ID NO: 8650 - protein, 11 aa, synthetic construct
  REGION 1..11: note = short peptide
KARPSSPSTSW

SEQ ID NO: 8651 - protein, 8 aa, synthetic construct
  REGION 1..8: note = short peptide
KANDTSYI

SEQ ID NO: 8652 - protein, 15 aa, synthetic construct
  REGION 1..15: note = short peptide
PEKDIEFIYTAPSSA

SEQ ID NO: 8653 - protein, 9 aa, synthetic construct
  REGION 1..9: note = short peptide
KATAAESAF

SEQ ID NO: 8654 - protein, 13 aa, synthetic construct
  REGION 1..13: note = short peptide
MRMELERPGGNEI

SEQ ID NO: 8655 - protein, 9 aa, synthetic construct
  REGION 1..9: note = short peptide
MQPQESHVH

SEQ ID NO: 8656 - protein, 8 aa, synthetic construct
  REGION 1..8: note = short peptide
NIMSVLER

SEQ ID NO: 8657 - protein, 9 aa, synthetic construct
  REGION 1..9: note = short peptide
NHDIALLRL

SEQ ID NO: 8658 - protein, 14 aa, synthetic construct
  REGION 1..14: note = short peptide
QQQQWGSRGGFAGR

SEQ ID NO: 8659 - protein, 11 aa, synthetic construct
  REGION 1..11: note = short peptide
HTLERNPMNVR

SEQ ID NO: 8660 - protein, 9 aa, synthetic construct
  REGION 1..9: note = short peptide
HTWNGTSRK

SEQ ID NO: 8661 - protein, 10 aa, synthetic construct
  REGION 1..10: note = short peptide
QIFVKTLTGK

SEQ ID NO: 8662 - protein, 10 aa, synthetic construct
  REGION 1..10: note = short peptide
RASRPARPLR

SEQ ID NO: 8663 - protein, 10 aa, synthetic construct
  REGION 1..10: note = short peptide
RAVEPALLQR

SEQ ID NO: 8664 - protein, 8 aa, synthetic construct
  REGION 1..8: note = short peptide
RALFRKAR

SEQ ID NO: 8665 - protein, 9 aa, synthetic construct
  REGION 1..9: note = short peptide
HSNGSVAYF

SEQ ID NO: 8666 - protein, 11 aa, synthetic construct
  REGION 1..11: note = short peptide
RAGAPHALAPH

SEQ ID NO: 8667 - protein, 8 aa, synthetic construct
  REGION 1..8: note = short peptide
QHFREQFL

SEQ ID NO: 8668 - protein, 10 aa, synthetic construct
  REGION 1..10: note = short peptide
PRKVVGQQDL

SEQ ID NO: 8669 - protein, 10 aa, synthetic construct
  REGION 1..10: note = short peptide
PRPAAGHLGP

SEQ ID NO: 8670 - protein, 15 aa, synthetic construct
  REGION 1..15: note = short peptide
QAVLHMEQRKQQQQQ

SEQ ID NO: 8671 - protein, 10 aa, synthetic construct
  REGION 1..10: note = short peptide
LDEAGQRSTM

SEQ ID NO: 8672 - protein, 11 aa, synthetic construct
  REGION 1..11: note = short peptide
IISSNRSHIVK

SEQ ID NO: 8673 - protein, 10 aa, synthetic construct
  REGION 1..10: note = short peptide
LDEAGQRSTM

SEQ ID NO: 8674 - protein, 9 aa, synthetic construct
  REGION 1..9: note = short peptide
LYNFTGEQM

SEQ ID NO: 8675 - protein, 10 aa, synthetic construct
  REGION 1..10: note = short peptide
LVKDNGNGTY

SEQ ID NO: 8676 - protein, 11 aa, synthetic construct
  REGION 1..11: note = short peptide
KLCEGFNEVLK

SEQ ID NO: 8677 - protein, 15 aa, synthetic construct
  REGION 1..15: note = short peptide
MEAAGSPAATETGKY

SEQ ID NO: 8678 - protein, 10 aa, synthetic construct
  REGION 1..10: note = short peptide
MEKEETTREL

SEQ ID NO: 8679 - protein, 10 aa, synthetic construct
  REGION 1..10: note = short peptide
LPSNGSMHNY

SEQ ID NO: 8680 - protein, 15 aa, synthetic construct
  REGION 1..15: note = short peptide
KNPKFMETVAEKALQ

SEQ ID NO: 8681 - protein, 15 aa, synthetic construct
  REGION 1..15: note = short peptide
KNPKFMETVAEKALQ

SEQ ID NO: 8682 - protein, 9 aa, synthetic construct
  REGION 1..9: note = short peptide
LNRPKVNKI

SEQ ID NO: 8683 - protein, 9 aa, synthetic construct
  REGION 1..9: note = short peptide
KLVHPTDKF

SEQ ID NO: 8684 - protein, 10 aa, synthetic construct
  REGION 1..10: note = short peptide
LPYRSTPPLY

SEQ ID NO: 8685 - protein, 9 aa, synthetic construct
  REGION 1..9: note = short peptide
LQKVNATNF

SEQ ID NO: 8686 - protein, 8 aa, synthetic construct
  REGION 1..8: note = short peptide
MLTRVKSA

SEQ ID NO: 8687 - protein, 9 aa, synthetic construct
  REGION 1..9: note = short peptide
KGKRNLSYW

SEQ ID NO: 8688 - protein, 11 aa, synthetic construct
  REGION 1..11: note = short peptide
KPFNPLLGETF

SEQ ID NO: 8689 - protein, 12 aa, synthetic construct
  REGION 1..12: note = short peptide
MPMDIVNTSGRF

SEQ ID NO: 8690 - protein, 12 aa, synthetic construct
  REGION 1..12: note = short peptide
KHFELGGDKKRK

SEQ ID NO: 8691 - protein, 10 aa, synthetic construct
  REGION 1..10: note = short peptide
MPISDPASSV

SEQ ID NO: 8692 - protein, 9 aa, synthetic construct
  REGION 1..9: note = short peptide
KEVTAAPAV

SEQ ID NO: 8693 - protein, 9 aa, synthetic construct
  REGION 1..9: note = short peptide
KGDKAFLCR

SEQ ID NO: 8694 - protein, 15 aa, synthetic construct
  REGION 1..15: note = short peptide
KGKNIKIISKIENHE

SEQ ID NO: 8695 - protein, 13 aa, synthetic construct
  REGION 1..13: note = short peptide
MNHTVQTFFSPVN

SEQ ID NO: 8696 - protein, 13 aa, synthetic construct
  REGION 1..13: note = short peptide
KIILETKSKTIYK

SEQ ID NO: 8697 - protein, 10 aa, synthetic construct
  REGION 1..10: note = short peptide
KIPKHVKKRK

SEQ ID NO: 8698 - protein, 11 aa, synthetic construct
  REGION 1..11: note = short peptide
LHQDPSTNQTW

SEQ ID NO: 8699 - protein, 10 aa, synthetic construct
  REGION 1..10: note = short peptide
RDLGGQIKLR

SEQ ID NO: 8700 - protein, 9 aa, synthetic construct
  REGION 1..9: note = short peptide
FPREPRPKL

SEQ ID NO: 8701 - protein, 10 aa, synthetic construct
  REGION 1..10: note = short peptide
FSNSSNVGRY

SEQ ID NO: 8702 - protein, 11 aa, synthetic construct
  REGION 1..11: note = short peptide
SGGKYVDSEGH

SEQ ID NO: 8703 - protein, 9 aa, synthetic construct
  REGION 1..9: note = short peptide
SHCIAILKI

SEQ ID NO: 8704 - protein, 11 aa, synthetic construct
  REGION 1..11: note = short peptide
SKASKSSKGKD

SEQ ID NO: 8705 - protein, 9 aa, synthetic construct
  REGION 1..9: note = short peptide
SHLAKQLGY

SEQ ID NO: 8706 - protein, 15 aa, synthetic construct
  REGION 1..15: note = short peptide
SHVAVENALGLDQQF

SEQ ID NO: 8707 - protein, 9 aa, synthetic construct
  REGION 1..9: note = short peptide
SHNSTNSEF

SEQ ID NO: 8708 - protein, 9 aa, synthetic construct
  REGION 1..9: note = short peptide
SALEKSMHL

SEQ ID NO: 8709 - protein, 9 aa, synthetic construct
  REGION 1..9: note = short peptide
KYFHTSVSR

SEQ ID NO: 8710 - protein, 9 aa, synthetic construct
  REGION 1..9: note = short peptide
RYYAPVRQR

SEQ ID NO: 8711 - protein, 15 aa, synthetic construct
  REGION 1..15: note = short peptide
GDKGTRVFKKASPNG

SEQ ID NO: 8712 - protein, 10 aa, synthetic construct
  REGION 1..10: note = short peptide
SEEAEIIRKY

SEQ ID NO: 8713 - protein, 9 aa, synthetic construct
  REGION 1..9: note = short peptide
FLNGSYNDY

SEQ ID NO: 8714 - protein, 9 aa, synthetic construct
  REGION 1..9: note = short peptide
SPISICSLI

SEQ ID NO: 8715 - protein, 10 aa, synthetic construct
  REGION 1..10: note = short peptide
EPYQNHSGRF

SEQ ID NO: 8716 - protein, 9 aa, synthetic construct
  REGION 1..9: note = short peptide
EMSEYSDDY

SEQ ID NO: 8717 - protein, 13 aa, synthetic construct
  REGION 1..13: note = short peptide
ESRAELTSDKDMY

SEQ ID NO: 8718 - protein, 13 aa, synthetic construct
  REGION 1..13: note = short peptide
SPAKQQAPPVRNL

SEQ ID NO: 8719 - protein, 9 aa, synthetic construct
  REGION 1..9: note = short peptide
SPDRVFNTP

SEQ ID NO: 8720 - protein, 11 aa, synthetic construct
  REGION 1..11: note = short peptide
EGHLKRNIVVK

SEQ ID NO: 8721 - protein, 9 aa, synthetic construct
  REGION 1..9: note = short peptide
KVQTKYLGR

SEQ ID NO: 8722 - protein, 9 aa, synthetic construct
  REGION 1..9: note = short peptide
FASYIEKVR

SEQ ID NO: 8723 - protein, 9 aa, synthetic construct
  REGION 1..9: note = short peptide
FLDQNLQKY

SEQ ID NO: 8724 - protein, 10 aa, synthetic construct
  REGION 1..10: note = short peptide
SLDDRNSSRY

SEQ ID NO: 8725 - protein, 9 aa, synthetic construct
  REGION 1..9: note = short peptide
FGKAPGTPH

SEQ ID NO: 8726 - protein, 13 aa, synthetic construct
  REGION 1..13: note = short peptide
ETNCQTNSTHDPY

SEQ ID NO: 8727 - protein, 8 aa, synthetic construct
  REGION 1..8: note = short peptide
KRFVTQKR

SEQ ID NO: 8728 - protein, 9 aa, synthetic construct
  REGION 1..9: note = short peptide
GHSPVLRNI

SEQ ID NO: 8729 - protein, 11 aa, synthetic construct
  REGION 1..11: note = short peptide
RLRNVSWATGR

SEQ ID NO: 8730 - protein, 10 aa, synthetic construct
  REGION 1..10: note = short peptide
RMFLSFPTTK

SEQ ID NO: 8731 - protein, 8 aa, synthetic construct
  REGION 1..8: note = short peptide
RLKDIIHR

SEQ ID NO: 8732 - protein, 9 aa, synthetic construct
  REGION 1..9: note = short peptide
HHDQDHPTF

SEQ ID NO: 8733 - protein, 10 aa, synthetic construct
  REGION 1..10: note = short peptide
HGVAGAVAVF

SEQ ID NO: 8734 - protein, 11 aa, synthetic construct
  REGION 1..11: note = short peptide
RPLGNLSRNSL

SEQ ID NO: 8735 - protein, 11 aa, synthetic construct
  REGION 1..11: note = short peptide
RPPAVTSNGTL

SEQ ID NO: 8736 - protein, 9 aa, synthetic construct
  REGION 1..9: note = short peptide
GYRRPYNYR

SEQ ID NO: 8737 - protein, 10 aa, synthetic construct
  REGION 1..10: note = short peptide
RPPYNRAVSL

SEQ ID NO: 8738 - protein, 9 aa, synthetic construct
  REGION 1..9: note = short peptide
GVKKPHRYR

SEQ ID NO: 8739 - protein, 15 aa, synthetic construct
  REGION 1..15: note = short peptide
RPKDYEVDATLKSLN

SEQ ID NO: 8740 - protein, 10 aa, synthetic construct
  REGION 1..10: note = short peptide
HEAAPGKASY

SEQ ID NO: 8741 - protein, 10 aa, synthetic construct
  REGION 1..10: note = short peptide
KPPWRPPGGK

SEQ ID NO: 8742 - protein, 10 aa, synthetic construct
  REGION 1..10: note = short peptide
RPHSANGEVY

SEQ ID NO: 8743 - protein, 11 aa, synthetic construct
  REGION 1..11: note = short peptide
RGFQRDLSSLR

SEQ ID NO: 8744 - protein, 9 aa, synthetic construct
  REGION 1..9: note = short peptide
RGGRAVAPR

SEQ ID NO: 8745 - protein, 9 aa, synthetic construct
  REGION 1..9: note = short peptide
REAERLVKY

SEQ ID NO: 8746 - protein, 13 aa, synthetic construct
  REGION 1..13: note = short peptide
RFINYNQTVSRMR

SEQ ID NO: 8747 - protein, 10 aa, synthetic construct
  REGION 1..10: note = short peptide
RINSSSPLRY

SEQ ID NO: 8748 - protein, 10 aa, synthetic construct
  REGION 1..10: note = short peptide
KPMLAAIADI

SEQ ID NO: 8749 - protein, 9 aa, synthetic construct
  REGION 1..9: note = short peptide
RYQEVCRQR

SEQ ID NO: 8750 - protein, 10 aa, synthetic construct
  REGION 1..10: note = short peptide
RVASPTSGVK

SEQ ID NO: 8751 - protein, 12 aa, synthetic construct
  REGION 1..12: note = short peptide
RTKADSVPGTYR

SEQ ID NO: 8752 - protein, 12 aa, synthetic construct
  REGION 1..12: note = short peptide
RTKSDASCMSQR

SEQ ID NO: 8753 - protein, 11 aa, synthetic construct
  REGION 1..11: note = short peptide
RTMNASLAQQL

SEQ ID NO: 8754 - protein, 13 aa, synthetic construct
  REGION 1..13: note = short peptide
RTMNASLAQQLCR

SEQ ID NO: 8755 - protein, 9 aa, synthetic construct
  REGION 1..9: note = short peptide
GPMQNATKY

SEQ ID NO: 8756 - protein, 9 aa, synthetic construct
  REGION 1..9: note = short peptide
RTIQLNVTY

SEQ ID NO: 8757 - protein, 11 aa, synthetic construct
  REGION 1..11: note = short peptide
KPRPKLTAPKI

SEQ ID NO: 8758 - protein, 10 aa, synthetic construct
  REGION 1..10: note = short peptide
RSWGRGGTTR

SEQ ID NO: 8759 - protein, 9 aa, synthetic construct
  REGION 1..9: note = short peptide
KPSEGSYRI

SEQ ID NO: 8760 - protein, 11 aa, synthetic construct
  REGION 1..11: note = short peptide
RSRSPGSYKQR

SEQ ID NO: 8761 - protein, 10 aa, synthetic construct
  REGION 1..10: note = short peptide
RVRSLETENR

SEQ ID NO: 8762 - protein, 9 aa, synthetic construct
  REGION 1..9: note = short peptide
RYAAKFYRR

SEQ ID NO: 8763 - protein, 11 aa, synthetic construct
  REGION 1..11: note = short peptide
RYLNLSSTSLR

SEQ ID NO: 8764 - protein, 10 aa, synthetic construct
  REGION 1..10: note = short peptide
RVIVGTIRPR

SEQ ID NO: 8765 - protein, 12 aa, synthetic construct
  REGION 1..12: note = short peptide
RVKVDGPRSPSY

SEQ ID NO: 8766 - protein, 11 aa, synthetic construct
  REGION 1..11: note = short peptide
RVNGHMGGSYW

SEQ ID NO: 8767 - protein, 11 aa, synthetic construct
  REGION 1..11: note = short peptide
RSRSFSGLIKR

SEQ ID NO: 8768 - protein, 9 aa, synthetic construct
  REGION 1..9: note = short peptide
RQRAILYKR

SEQ ID NO: 8769 - protein, 12 aa, synthetic construct
  REGION 1..12: note = short peptide
RRDLGEELEALR

SEQ ID NO: 8770 - protein, 10 aa, synthetic construct
  REGION 1..10: note = short peptide
RQNNYTVNNK

SEQ ID NO: 8771 - protein, 10 aa, synthetic construct
  REGION 1..10: note = short peptide
RPTRVGLSSL

SEQ ID NO: 8772 - protein, 10 aa, synthetic construct
  REGION 1..10: note = short peptide
RQKDVKDGKY

SEQ ID NO: 8773 - protein, 12 aa, synthetic construct
  REGION 1..12: note = short peptide
RSRGQGYVGGQR

SEQ ID NO: 8774 - protein, 9 aa, synthetic construct
  REGION 1..9: note = short peptide
RRNDKIIVF

SEQ ID NO: 8775 - protein, 11 aa, synthetic construct
  REGION 1..11: note = short peptide
GQYNRGGYGNY

SEQ ID NO: 8776 - protein, 13 aa, synthetic construct
  REGION 1..13: note = short peptide
RSLSNSTARNVTW

SEQ ID NO: 8777 - protein, 12 aa, synthetic construct
  REGION 1..12: note = short peptide
RSRGGGGGGFHR

SEQ ID NO: 8778 - protein, 12 aa, synthetic construct
  REGION 1..12: note = short peptide
RSRGGGGGGFHR

SEQ ID NO: 8779 - protein, 11 aa, synthetic construct
  REGION 1..11: note = short peptide
RRSYVSSGEMM

SEQ ID NO: 8780 - protein, 11 aa, synthetic construct
  REGION 1..11: note = short peptide
RRSYVSSGEMM

SEQ ID NO: 8781 - protein, 10 aa, synthetic construct
  REGION 1..10: note = short peptide
RVQDVACRCR

SEQ ID NO: 8782 - protein, 10 aa, synthetic construct
  REGION 1..10: note = short peptide
RVQDVACRCR

SEQ ID NO: 8783 - protein, 9 aa, synthetic construct
  REGION 1..9: note = short peptide
RVWCGYKNK

SEQ ID NO: 8784 - protein, 9 aa, synthetic construct
  REGION 1..9: note = short peptide
VTDCKPVEY

SEQ ID NO: 8785 - protein, 10 aa, synthetic construct
  REGION 1..10: note = short peptide
RYFACLMRAR

SEQ ID NO: 8786 - protein, 9 aa, synthetic construct
  REGION 1..9: note = short peptide
SERCAKNGY

SEQ ID NO: 8787 - protein, 9 aa, synthetic construct
  REGION 1..9: note = short peptide
RYFMHGVCR

SEQ ID NO: 8788 - protein, 9 aa, synthetic construct
  REGION 1..9: note = short peptide
SENHLRHCL

SEQ ID NO: 8789 - protein, 12 aa, synthetic construct
  REGION 1..12: note = short peptide
THICQDTNQVLF

SEQ ID NO: 8790 - protein, 9 aa, synthetic construct
  REGION 1..9: note = short peptide
THIVNIESF

SEQ ID NO: 8791 - protein, 9 aa, synthetic construct
  REGION 1..9: note = short peptide
SQLNVSSCY

SEQ ID NO: 8792 - protein, 9 aa, synthetic construct
  REGION 1..9: note = short peptide
SVIQKSCAF

SEQ ID NO: 8793 - protein, 11 aa, synthetic construct
  REGION 1..11: note = short peptide
YPLVHVVCQSY

SEQ ID NO: 8794 - protein, 11 aa, synthetic construct
  REGION 1..11: note = short peptide
TEDYAGRYRCY

SEQ ID NO: 8795 - protein, 9 aa, synthetic construct
  REGION 1..9: note = short peptide
TECGYVTKW

SEQ ID NO: 8796 - protein, 10 aa, synthetic construct
  REGION 1..10: note = short peptide
SMNGLSSLRK

SEQ ID NO: 8797 - protein, 9 aa, synthetic construct
  REGION 1..9: note = short peptide
SHSEGCLLL

SEQ ID NO: 8798 - protein, 9 aa, synthetic construct
  REGION 1..9: note = short peptide
SIDPCQDFY

SEQ ID NO: 8799 - protein, 9 aa, synthetic construct
  REGION 1..9: note = short peptide
YIDSTPCRY

SEQ ID NO: 8800 - protein, 9 aa, synthetic construct
  REGION 1..9: note = short peptide
VAFPLSHNL

SEQ ID NO: 8801 - protein, 9 aa, synthetic construct
  REGION 1..9: note = short peptide
TPYAECDFY

SEQ ID NO: 8802 - protein, 13 aa, synthetic construct
  REGION 1..13: note = short peptide
TQQREVICVRKNA

SEQ ID NO: 8803 - protein, 9 aa, synthetic construct
  REGION 1..9: note = short peptide
TQQVIQCAY

SEQ ID NO: 8804 - protein, 9 aa, synthetic construct
  REGION 1..9: note = short peptide
TSHTCKSNW

SEQ ID NO: 8805 - protein, 8 aa, synthetic construct
  REGION 1..8: note = short peptide
HHTNQYYH

SEQ ID NO: 8806 - protein, 15 aa, synthetic construct
  REGION 1..15: note = short peptide
FHADICTLSEKERQI

SEQ ID NO: 8807 - protein, 10 aa, synthetic construct
  REGION 1..10: note = short peptide
KALEICGAQR

SEQ ID NO: 8808 - protein, 11 aa, synthetic construct
  REGION 1..11: note = short peptide
ITVCEQKISEW

SEQ ID NO: 8809 - protein, 9 aa, synthetic construct
  REGION 1..9: note = short peptide
KEAANMILV

SEQ ID NO: 8810 - protein, 8 aa, synthetic construct
  REGION 1..8: note = short peptide
IPTHKCGL

SEQ ID NO: 8811 - protein, 9 aa, synthetic construct
  REGION 1..9: note = short peptide
HTYCGKIYK

SEQ ID NO: 8812 - protein, 10 aa, synthetic construct
  REGION 1..10: note = short peptide
HPFYDCQTDF

SEQ ID NO: 8813 - protein, 9 aa, synthetic construct
  REGION 1..9: note = short peptide
HPMCKSSQF

SEQ ID NO: 8814 - protein, 10 aa, synthetic construct
  REGION 1..10: note = short peptide
HPTCSFDITY

SEQ ID NO: 8815 - protein, 10 aa, synthetic construct
  REGION 1..10: note = short peptide
HPYCSPPMTF

SEQ ID NO: 8816 - protein, 9 aa, synthetic construct
  REGION 1..9: note = short peptide
CAAADPHEC

SEQ ID NO: 8817 - protein, 11 aa, synthetic construct
  REGION 1..11: note = short peptide
AGKPPCGATKR

SEQ ID NO: 8818 - protein, 10 aa, synthetic construct
  REGION 1..10: note = short peptide
EHVAAECSTW

SEQ ID NO: 8819 - protein, 10 aa, synthetic construct
  REGION 1..10: note = short peptide
EEPIPCTAHW

SEQ ID NO: 8820 - protein, 11 aa, synthetic construct
  REGION 1..11: note = short peptide
EEVATNGKQRW

SEQ ID NO: 8821 - protein, 9 aa, synthetic construct
  REGION 1..9: note = short peptide
EHERSCYWF

SEQ ID NO: 8822 - protein, 9 aa, synthetic construct
  REGION 1..9: note = short peptide
EQCPNITRI

SEQ ID NO: 8823 - protein, 10 aa, synthetic construct
  REGION 1..10: note = short peptide
EECQRFAKQY

SEQ ID NO: 8824 - protein, 12 aa, synthetic construct
  REGION 1..12: note = short peptide
NSCERGDTTTLY

SEQ ID NO: 8825 - protein, 9 aa, synthetic construct
  REGION 1..9: note = short peptide
QECQDPNRF

SEQ ID NO: 8826 - protein, 9 aa, synthetic construct
  REGION 1..9: note = short peptide
PNNHIGISF

SEQ ID NO: 8827 - protein, 12 aa, synthetic construct
  REGION 1..12: note = short peptide
PGSHHANGNKLS

SEQ ID NO: 8828 - protein, 9 aa, synthetic construct
  REGION 1..9: note = short peptide
MVACGKSAY

SEQ ID NO: 8829 - protein, 9 aa, synthetic construct
  REGION 1..9: note = short peptide
RMKCTLTSR

SEQ ID NO: 8830 - protein, 9 aa, synthetic construct
  REGION 1..9: note = short peptide
RTKVSCKSW

SEQ ID NO: 8831 - protein, 11 aa, synthetic construct
  REGION 1..11: note = short peptide
RPRQNSLHGSF

SEQ ID NO: 8832 - protein, 11 aa, synthetic construct
  REGION 1..11: note = short peptide
RQAIHVGNQTF

SEQ ID NO: 8833 - protein, 9 aa, synthetic construct
  REGION 1..9: note = short peptide
RQKDNGCFR

SEQ ID NO: 8834 - protein, 9 aa, synthetic construct
  REGION 1..9: note = short peptide
QPFACGTAF

SEQ ID NO: 8835 - protein, 12 aa, synthetic construct
  REGION 1..12: note = short peptide
RGKCEALQGFAR

SEQ ID NO: 8836 - protein, 10 aa, synthetic construct
  REGION 1..10: note = short peptide
RIIQTLFSCK

SEQ ID NO: 8837 - protein, 10 aa, synthetic construct
  REGION 1..10: note = short peptide
KPFGNSISRY

SEQ ID NO: 8838 - protein, 12 aa, synthetic construct
  REGION 1..12: note = short peptide
KQVCATRQLVNR

SEQ ID NO: 8839 - protein, 10 aa, synthetic construct
  REGION 1..10: note = short peptide
KSHCVDDNSW

SEQ ID NO: 8840 - protein, 9 aa, synthetic construct
  REGION 1..9: note = short peptide
KINECVMKK

SEQ ID NO: 8841 - protein, 9 aa, synthetic construct
  REGION 1..9: note = short peptide
KGQKIVSCR

SEQ ID NO: 8842 - protein, 9 aa, synthetic construct
  REGION 1..9: note = short peptide
KLFEKSKCR

SEQ ID NO: 8843 - protein, 10 aa, synthetic construct
  REGION 1..10: note = short peptide
KVKPAGELCR

SEQ ID NO: 8844 - protein, 9 aa, synthetic construct
  REGION 1..9: note = short peptide
KTLNTVECY

SEQ ID NO: 8845 - protein, 8 aa, synthetic construct
  REGION 1..8: note = short peptide
KVARVANP

SEQ ID NO: 8846 - protein, 10 aa, synthetic construct
  REGION 1..10: note = short peptide
LAQAVSTQLY

SEQ ID NO: 8847 - protein, 9 aa, synthetic construct
  REGION 1..9: note = short peptide
LEQCRQLYW

SEQ ID NO: 8848 - protein, 14 aa, synthetic construct
  REGION 1..14: note = short peptide
SSYPYSQSDQSMNR

SEQ ID NO: 8849 - protein, 10 aa, synthetic construct
  REGION 1..10: note = short peptide
THEFTVEQCF

SEQ ID NO: 8850 - protein, 8 aa, synthetic construct
  REGION 1..8: note = short peptide
TGHCVHMR

SEQ ID NO: 8851 - protein, 9 aa, synthetic construct
  REGION 1..9: note = short peptide
ATYSCPRQK

SEQ ID NO: 8852 - protein, 10 aa, synthetic construct
  REGION 1..10: note = short peptide
YPATRVNGEL

SEQ ID NO: 8853 - protein, 14 aa, synthetic construct
  REGION 1..14: note = short peptide
YLDNEEEENDGHWF

SEQ ID NO: 8854 - protein, 15 aa, synthetic construct
  REGION 1..15: note = short peptide
DLDYDFQRDYYDRMY

SEQ ID NO: 8855 - protein, 8 aa, synthetic construct
  REGION 1..8: note = short peptide
QGRIPVKW

SEQ ID NO: 8856 - protein, 9 aa, synthetic construct
  REGION 1..9: note = short peptide
RFYWRPHCR

SEQ ID NO: 8857 - protein, 9 aa, synthetic construct
  REGION 1..9: note = short peptide
RFYNYTVCR

SEQ ID NO: 8858 - protein, 9 aa, synthetic construct
  REGION 1..9: note = short peptide
KQQEIHSTR

SEQ ID NO: 8859 - protein, 8 aa, synthetic construct
  REGION 1..8: note = short peptide
RAARCVRW

SEQ ID NO: 8860 - protein, 9 aa, synthetic construct
  REGION 1..9: note = short peptide
KTRPDGNCF

SEQ ID NO: 8861 - protein, 9 aa, synthetic construct
  REGION 1..9: note = short peptide
KSIVNGGSW

SEQ ID NO: 8862 - protein, 8 aa, synthetic construct
  REGION 1..8: note = short peptide
HSYKVSNY

SEQ ID NO: 8863 - protein, 9 aa, synthetic construct
  REGION 1..9: note = short peptide
HTEVDNCRY

SEQ ID NO: 8864 - protein, 9 aa, synthetic construct
  REGION 1..9: note = short peptide
HVCFGHFKY

SEQ ID NO: 8865 - protein, 10 aa, synthetic construct
  REGION 1..10: note = short peptide
HVKDVATVCR

SEQ ID NO: 8866 - protein, 9 aa, synthetic construct
  REGION 1..9: note = short peptide
RYRCLENSR

SEQ ID NO: 8867 - protein, 8 aa, synthetic construct
  REGION 1..8: note = short peptide
HANCIVHR

SEQ ID NO: 8868 - protein, 9 aa, synthetic construct
  REGION 1..9: note = short peptide
SQDTGKYCF

SEQ ID NO: 8869 - protein, 9 aa, synthetic construct
  REGION 1..9: note = short peptide
GTLNGRTGW

SEQ ID NO: 8870 - protein, 9 aa, synthetic construct
  REGION 1..9: note = short peptide
HNYQPCVQR

SEQ ID NO: 8871 - protein, 11 aa, synthetic construct
  REGION 1..11: note = short peptide
KLKECVSILPR

SEQ ID NO: 8872 - protein, 10 aa, synthetic construct
  REGION 1..10: note = short peptide
RVADVYRYCR

SEQ ID NO: 8873 - protein, 9 aa, synthetic construct
  REGION 1..9: note = short peptide
KAFDCPSSF

SEQ ID NO: 8874 - protein, 9 aa, synthetic construct
  REGION 1..9: note = short peptide
RVRNGFLMR

SEQ ID NO: 8875 - protein, 9 aa, synthetic construct
  REGION 1..9: note = short peptide
RTNSCPIVR

SEQ ID NO: 8876 - protein, 9 aa, synthetic construct
  REGION 1..9: note = short peptide
KAWASNCQF

SEQ ID NO: 8877 - protein, 9 aa, synthetic construct
  REGION 1..9: note = short peptide
KIAVHCTVR

SEQ ID NO: 8878 - protein, 11 aa, synthetic construct
  REGION 1..11: note = short peptide
RTACERAKRTL

SEQ ID NO: 8879 - protein, 9 aa, synthetic construct
  REGION 1..9: note = short peptide
RSYCRALER

SEQ ID NO: 8880 - protein, 13 aa, synthetic construct
  REGION 1..13: note = short peptide
STGPTAATGSNRR

SEQ ID NO: 8881 - protein, 9 aa, synthetic construct
  REGION 1..9: note = short peptide
VVYVIDSCK

SEQ ID NO: 8882 - protein, 12 aa, synthetic construct
  REGION 1..12: note = short peptide
TAGQSGLYSPQY

SEQ ID NO: 8883 - protein, 8 aa, synthetic construct
  REGION 1..8: note = short peptide
QHFREQFL

SEQ ID NO: 8884 - protein, 11 aa, synthetic construct
  REGION 1..11: note = short peptide
IISSNRSHIVK

SEQ ID NO: 8885 - protein, 9 aa, synthetic construct
  REGION 1..9: note = short peptide
KGDKAFLCR

SEQ ID NO: 8886 - protein, 13 aa, synthetic construct
  REGION 1..13: note = short peptide
MNHTVQTFFSPVN

SEQ ID NO: 8887 - protein, 10 aa, synthetic construct
  REGION 1..10: note = short peptide
RDLGGQIKLR

SEQ ID NO: 8888 - protein, 9 aa, synthetic construct
  REGION 1..9: note = short peptide
SHCIAILKI

SEQ ID NO: 8889 - protein, 9 aa, synthetic construct
  REGION 1..9: note = short peptide
SPDRVFNTP

SEQ ID NO: 8890 - protein, 13 aa, synthetic construct
  REGION 1..13: note = short peptide
ETNCQTNSTHDPY

SEQ ID NO: 8891 - protein, 10 aa, synthetic construct
  REGION 1..10: note = short peptide
KPPWRPPGGK

SEQ ID NO: 8892 - protein, 11 aa, synthetic construct
  REGION 1..11: note = short peptide
RGFQRDLSSLR

SEQ ID NO: 8893 - protein, 9 aa, synthetic construct
  REGION 1..9: note = short peptide
RYQEVCRQR

SEQ ID NO: 8894 - protein, 11 aa, synthetic construct
  REGION 1..11: note = short peptide
GQYNRGGYGNY

SEQ ID NO: 8895 - protein, 12 aa, synthetic construct
  REGION 1..12: note = short peptide
RSRGGGGGGFHR

SEQ ID NO: 8896 - protein, 9 aa, synthetic construct
  REGION 1..9: note = short peptide
EQCPNITRI

SEQ ID NO: 8897 - protein, 9 aa, synthetic construct
  REGION 1..9: note = short peptide
EQCPNITRI

SEQ ID NO: 8898 - protein, 9 aa, synthetic construct
  REGION 1..9: note = short peptide
KVCEKVQRK

SEQ ID NO: 8899 - protein, 15 aa, synthetic construct
  REGION 1..15: note = short peptide
AQQAADKYLYVDKNF

SEQ ID NO: 8900 - protein, 11 aa, synthetic construct
  REGION 1..11: note = short peptide
KSAPATGGVKK

SEQ ID NO: 8901 - protein, 9 aa, synthetic construct
  REGION 1..9: note = short peptide
VTCSQVHFK

SEQ ID NO: 8902 - protein, 8 aa, synthetic construct
  REGION 1..8: note = short peptide
KLLQPPPK

SEQ ID NO: 8903 - protein, 8 aa, synthetic construct
  REGION 1..8: note = short peptide
MAPRSLLL

SEQ ID NO: 8904 - protein, 10 aa, synthetic construct
  REGION 1..10: note = short peptide
RVCDIILPRL

SEQ ID NO: 8905 - protein, 9 aa, synthetic construct
  REGION 1..9: note = short peptide
GTCFGKFTK

SEQ ID NO: 8906 - protein, 13 aa, synthetic construct
  REGION 1..13: note = short peptide
ASFLPCSKDALLK

SEQ ID NO: 8907 - protein, 11 aa, synthetic construct
  REGION 1..11: note = short peptide
KTATKAYPQSP

SEQ ID NO: 8908 - protein, 11 aa, synthetic construct
  REGION 1..11: note = short peptide
KSAPATGGVKK

SEQ ID NO: 8909 - protein, 12 aa, synthetic construct
  REGION 1..12: note = short peptide
RVWDKVVSGSCK

SEQ ID NO: 8910 - protein, 10 aa, synthetic construct
  REGION 1..10: note = short peptide
GTCAFSILFK

SEQ ID NO: 8911 - protein, 8 aa, synthetic construct
  REGION 1..8: note = short peptide
FPPFVSCI

SEQ ID NO: 8912 - protein, 12 aa, synthetic construct
  REGION 1..12: note = short peptide
AVILPPLSPYFK

SEQ ID NO: 8913 - protein, 11 aa, synthetic construct
  REGION 1..11: note = short peptide
RLCENIAGHLK

SEQ ID NO: 8914 - protein, 13 aa, synthetic construct
  REGION 1..13: note = short peptide
AKKPAKAAAASKK

SEQ ID NO: 8915 - protein, 9 aa, synthetic construct
  REGION 1..9: note = short peptide
KVYENYPTY

SEQ ID NO: 8916 - protein, 11 aa, synthetic construct
  REGION 1..11: note = short peptide
KSAPATGGVKK

SEQ ID NO: 8917 - protein, 10 aa, synthetic construct
  REGION 1..10: note = short peptide
STCDHGIVAK

SEQ ID NO: 8918 - protein, 9 aa, synthetic construct
  REGION 1..9: note = short peptide
DAVPCSTTI

SEQ ID NO: 8919 - protein, 10 aa, synthetic construct
  REGION 1..10: note = short peptide
STCNTKLTLK

SEQ ID NO: 8920 - protein, 10 aa, synthetic construct
  REGION 1..10: note = short peptide
ASQCGSLIGK

SEQ ID NO: 8921 - protein, 11 aa, synthetic construct
  REGION 1..11: note = short peptide
GTIFIIKGVRK

SEQ ID NO: 8922 - protein, 9 aa, synthetic construct
  REGION 1..9: note = short peptide
LPISGTHCI

SEQ ID NO: 8923 - protein, 8 aa, synthetic construct
  REGION 1..8: note = short peptide
DAPCVVKV

SEQ ID NO: 8924 - protein, 9 aa, synthetic construct
  REGION 1..9: note = short peptide
MPNENIPEL

SEQ ID NO: 8925 - protein, 10 aa, synthetic construct
  REGION 1..10: note = short peptide
AVCKAGAVEK

SEQ ID NO: 8926 - protein, 9 aa, synthetic construct
  REGION 1..9: note = short peptide
AACSSAVRK

SEQ ID NO: 8927 - protein, 10 aa, synthetic construct
  REGION 1..10: note = short peptide
KSAPATGGVK

SEQ ID NO: 8928 - protein, 10 aa, synthetic construct
  REGION 1..10: note = short peptide
KVTEGSFVYK

SEQ ID NO: 8929 - protein, 11 aa, synthetic construct
  REGION 1..11: note = short peptide
KSAPATGGVKK

SEQ ID NO: 8930 - protein, 11 aa, synthetic construct
  REGION 1..11: note = short peptide
RLANTQGKKAK

SEQ ID NO: 8931 - protein, 10 aa, synthetic construct
  REGION 1..10: note = short peptide
TIFIIKGVRK

SEQ ID NO: 8932 - protein, 9 aa, synthetic construct
  REGION 1..9: note = short peptide
GTCRDFILK

SEQ ID NO: 8933 - protein, 11 aa, synthetic construct
  REGION 1..11: note = short peptide
GVMTPCDKILK

SEQ ID NO: 8934 - protein, 9 aa, synthetic construct
  REGION 1..9: note = short peptide
SVDPKNYPK

SEQ ID NO: 8935 - protein, 9 aa, synthetic construct
  REGION 1..9: note = short peptide
AVTKYTSAK

SEQ ID NO: 8936 - protein, 11 aa, synthetic construct
  REGION 1..11: note = short peptide
KSAPSTGGVKK

SEQ ID NO: 8937 - protein, 9 aa, synthetic construct
  REGION 1..9: note = short peptide
SSCGKFQTK

SEQ ID NO: 8938 - protein, 10 aa, synthetic construct
  REGION 1..10: note = short peptide
GQCGPVGVRK

SEQ ID NO: 8939 - protein, 9 aa, synthetic construct
  REGION 1..9: note = short peptide
IASNVTETM

SEQ ID NO: 8940 - protein, 12 aa, synthetic construct
  REGION 1..12: note = short peptide
KSAPAPKKGSKK

SEQ ID NO: 8941 - protein, 10 aa, synthetic construct
  REGION 1..10: note = short peptide
SQCDSPYVTK

SEQ ID NO: 8942 - protein, 8 aa, synthetic construct
  REGION 1..8: note = short peptide
ANLKVNNV

SEQ ID NO: 8943 - protein, 11 aa, synthetic construct
  REGION 1..11: note = short peptide
KSAPSTGGVKK

SEQ ID NO: 8944 - protein, 9 aa, synthetic construct
  REGION 1..9: note = short peptide
GTDEHVVCK

SEQ ID NO: 8945 - protein, 8 aa, synthetic construct
  REGION 1..8: note = short peptide
YPFKPPKV

SEQ ID NO: 8946 - protein, 9 aa, synthetic construct
  REGION 1..9: note = short peptide
LPFQACLKV

SEQ ID NO: 8947 - protein, 10 aa, synthetic construct
  REGION 1..10: note = short peptide
RGYNGFFSPK

SEQ ID NO: 8948 - protein, 9 aa, synthetic construct
  REGION 1..9: note = short peptide
GTDEHVVCK

SEQ ID NO: 8949 - protein, 9 aa, synthetic construct
  REGION 1..9: note = short peptide
STGGKAPRK

SEQ ID NO: 8950 - protein, 11 aa, synthetic construct
  REGION 1..11: note = short peptide
KSAPATGGVKK

SEQ ID NO: 8951 - protein, 11 aa, synthetic construct
  REGION 1..11: note = short peptide
HVYTGGKGCVK

SEQ ID NO: 8952 - protein, 11 aa, synthetic construct
  REGION 1..11: note = short peptide
VVCDNGTGFVK

SEQ ID NO: 8953 - protein, 8 aa, synthetic construct
  REGION 1..8: note = short peptide
DAPVACSI

SEQ ID NO: 8954 - protein, 11 aa, synthetic construct
  REGION 1..11: note = short peptide
KSAPSTGGVKK

SEQ ID NO: 8955 - protein, 15 aa, synthetic construct
  REGION 1..15: note = short peptide
SLKYPDENGFDAFLK

SEQ ID NO: 8956 - protein, 9 aa, synthetic construct
  REGION 1..9: note = short peptide
SVCGKSFSR

SEQ ID NO: 8957 - protein, 9 aa, synthetic construct
  REGION 1..9: note = short peptide
GSGSPAPPR

SEQ ID NO: 8958 - protein, 9 aa, synthetic construct
  REGION 1..9: note = short peptide
VKVSIIQPG

SEQ ID NO: 8959 - protein, 10 aa, synthetic construct
  REGION 1..10: note = short peptide
KVFDGIPPPY

SEQ ID NO: 8960 - protein, 11 aa, synthetic construct
  REGION 1..11: note = short peptide
TIMPKDIQLAR

SEQ ID NO: 8961 - protein, 10 aa, synthetic construct
  REGION 1..10: note = short peptide
KWSSSLANHK

SEQ ID NO: 8962 - protein, 9 aa, synthetic construct
  REGION 1..9: note = short peptide
STCQRFVEK

SEQ ID NO: 8963 - protein, 9 aa, synthetic construct
  REGION 1..9: note = short peptide
VTCNFIILR

SEQ ID NO: 8964 - protein, 10 aa, synthetic construct
  REGION 1..10: note = short peptide
LPYCPGKTLV

SEQ ID NO: 8965 - protein, 9 aa, synthetic construct
  REGION 1..9: note = short peptide
YPNGHAICI

SEQ ID NO: 8966 - protein, 9 aa, synthetic construct
  REGION 1..9: note = short peptide
GTMTGMLYK

SEQ ID NO: 8967 - protein, 10 aa, synthetic construct
  REGION 1..10: note = short peptide
GVISPQELLK

SEQ ID NO: 8968 - protein, 10 aa, synthetic construct
  REGION 1..10: note = short peptide
ECISSGIILK

SEQ ID NO: 8969 - protein, 9 aa, synthetic construct
  REGION 1..9: note = short peptide
FAHFYPYTY

SEQ ID NO: 8970 - protein, 10 aa, synthetic construct
  REGION 1..10: note = short peptide
KSAPSTGGVK

SEQ ID NO: 8971 - protein, 11 aa, synthetic construct
  REGION 1..11: note = short peptide
LRIGNKYITLK

SEQ ID NO: 8972 - protein, 11 aa, synthetic construct
  REGION 1..11: note = short peptide
KTLSSASEKPK

SEQ ID NO: 8973 - protein, 8 aa, synthetic construct
  REGION 1..8: note = short peptide
SSASQVKH

SEQ ID NO: 8974 - protein, 8 aa, synthetic construct
  REGION 1..8: note = short peptide
KEGGNINK

SEQ ID NO: 8975 - protein, 10 aa, synthetic construct
  REGION 1..10: note = short peptide
YPCPVEPKKI

SEQ ID NO: 8976 - protein, 9 aa, synthetic construct
  REGION 1..9: note = short peptide
YPLCQFQYI

SEQ ID NO: 8977 - protein, 10 aa, synthetic construct
  REGION 1..10: note = short peptide
ASCNNVQVCK

SEQ ID NO: 8978 - protein, 10 aa, synthetic construct
  REGION 1..10: note = short peptide
GTCVEGTIPK

SEQ ID NO: 8979 - protein, 12 aa, synthetic construct
  REGION 1..12: note = short peptide
GTMPVCGTILGK

SEQ ID NO: 8980 - protein, 9 aa, synthetic construct
  REGION 1..9: note = short peptide
SVCGKVFLR

SEQ ID NO: 8981 - protein, 8 aa, synthetic construct
  REGION 1..8: note = short peptide
DAPHAQCV

SEQ ID NO: 8982 - protein, 11 aa, synthetic construct
  REGION 1..11: note = short peptide
LRIGNKYITLK

SEQ ID NO: 8983 - protein, 10 aa, synthetic construct
  REGION 1..10: note = short peptide
ASCNNVQVCK

SEQ ID NO: 8984 - protein, 10 aa, synthetic construct
  REGION 1..10: note = short peptide
ASCNNVQVCK

SEQ ID NO: 8985 - protein, 12 aa, synthetic construct
  REGION 1..12: note = short peptide
AGAGSEARFAGL

SEQ ID NO: 8986 - protein, 11 aa, synthetic construct
  REGION 1..11: note = short peptide
KSAPSTGGVKK

SEQ ID NO: 8987 - protein, 11 aa, synthetic construct
  REGION 1..11: note = short peptide
WKVHIAKFSLL

SEQ ID NO: 8988 - protein, 10 aa, synthetic construct
  REGION 1..10: note = short peptide
SSSALGLKKL

SEQ ID NO: 8989 - protein, 8 aa, synthetic construct
  REGION 1..8: note = short peptide
ITGKPGVP

SEQ ID NO: 8990 - protein, 9 aa, synthetic construct
  REGION 1..9: note = short peptide
AVTKYTSSK

SEQ ID NO: 8991 - protein, 10 aa, synthetic construct
  REGION 1..10: note = short peptide
TIQSGEQPYK

SEQ ID NO: 8992 - protein, 8 aa, synthetic construct
  REGION 1..8: note = short peptide
YPPLVNCV

SEQ ID NO: 8993 - protein, 9 aa, synthetic construct
  REGION 1..9: note = short peptide
ASCQYSLLK

SEQ ID NO: 8994 - protein, 9 aa, synthetic construct
  REGION 1..9: note = short peptide
DALCVVKRV

SEQ ID NO: 8995 - protein, 10 aa, synthetic construct
  REGION 1..10: note = short peptide
SVPECEHHQK

SEQ ID NO: 8996 - protein, 9 aa, synthetic construct
  REGION 1..9: note = short peptide
VTCENFISK

SEQ ID NO: 8997 - protein, 9 aa, synthetic construct
  REGION 1..9: note = short peptide
SVQCMPVAK

SEQ ID NO: 8998 - protein, 12 aa, synthetic construct
  REGION 1..12: note = short peptide
GVCPLGPVPLTK

SEQ ID NO: 8999 - protein, 9 aa, synthetic construct
  REGION 1..9: note = short peptide
ATCELPLAK

SEQ ID NO: 9000 - protein, 9 aa, synthetic construct
  REGION 1..9: note = short peptide
VVADKSCEK

SEQ ID NO: 9001 - protein, 8 aa, synthetic construct
  REGION 1..8: note = short peptide
KEGGLPAI

SEQ ID NO: 9002 - protein, 9 aa, synthetic construct
  REGION 1..9: note = short peptide
IASNVTETM

SEQ ID NO: 9003 - protein, 11 aa, synthetic construct
  REGION 1..11: note = short peptide
KSAPATGGVKK

SEQ ID NO: 9004 - protein, 11 aa, synthetic construct
  REGION 1..11: note = short peptide
KSAPATGGVKK

SEQ ID NO: 9005 - protein, 11 aa, synthetic construct
  REGION 1..11: note = short peptide
KSAPATGGVKK

SEQ ID NO: 9006 - protein, 9 aa, synthetic construct
  REGION 1..9: note = short peptide
VPYLVGQVV

SEQ ID NO: 9007 - protein, 9 aa, synthetic construct
  REGION 1..9: note = short peptide
VPMGGVRLV

SEQ ID NO: 9008 - protein, 9 aa, synthetic construct
  REGION 1..9: note = short peptide
ATGDSIAVK

SEQ ID NO: 9009 - protein, 9 aa, synthetic construct
  REGION 1..9: note = short peptide
LNEELVLLM

SEQ ID NO: 9010 - protein, 11 aa, synthetic construct
  REGION 1..11: note = short peptide
ATNAACASLLK

SEQ ID NO: 9011 - protein, 9 aa, synthetic construct
  REGION 1..9: note = short peptide
CPFTGNVSI

SEQ ID NO: 9012 - protein, 9 aa, synthetic construct
  REGION 1..9: note = short peptide
KGEKVPKGK

SEQ ID NO: 9013 - protein, 9 aa, synthetic construct
  REGION 1..9: note = short peptide
KLLGKSSRK

SEQ ID NO: 9014 - protein, 10 aa, synthetic construct
  REGION 1..10: note = short peptide
KMPTTPVKAK

SEQ ID NO: 9015 - protein, 9 aa, synthetic construct
  REGION 1..9: note = short peptide
KPEKCYLVK

SEQ ID NO: 9016 - protein, 9 aa, synthetic construct
  REGION 1..9: note = short peptide
QIFNGTFVK

SEQ ID NO: 9017 - protein, 15 aa, synthetic construct
  REGION 1..15: note = short peptide
IEGNLIFDPNNYLPK

SEQ ID NO: 9018 - protein, 10 aa, synthetic construct
  REGION 1..10: note = short peptide
KSAPATGGVK

SEQ ID NO: 9019 - protein, 8 aa, synthetic construct
  REGION 1..8: note = short peptide
YPFKPPKV

SEQ ID NO: 9020 - protein, 11 aa, synthetic construct
  REGION 1..11: note = short peptide
VSFAEGTKFAP

SEQ ID NO: 9021 - protein, 10 aa, synthetic construct
  REGION 1..10: note = short peptide
ITTSPITVRK

SEQ ID NO: 9022 - protein, 8 aa, synthetic construct
  REGION 1..8: note = short peptide
NAISLPTI

SEQ ID NO: 9023 - protein, 9 aa, synthetic construct
  REGION 1..9: note = short peptide
AACSKFFYK

SEQ ID NO: 9024 - protein, 9 aa, synthetic construct
  REGION 1..9: note = short peptide
TVICSTINK

SEQ ID NO: 9025 - protein, 9 aa, synthetic construct
  REGION 1..9: note = short peptide
GTCAEKLKK

SEQ ID NO: 9026 - protein, 12 aa, synthetic construct
  REGION 1..12: note = short peptide
GTMPVCGTILGK

SEQ ID NO: 9027 - protein, 9 aa, synthetic construct
  REGION 1..9: note = short peptide
KICCGIIYK

SEQ ID NO: 9028 - protein, 9 aa, synthetic construct
  REGION 1..9: note = short peptide
DALLQLTCV

SEQ ID NO: 9029 - protein, 9 aa, synthetic construct
  REGION 1..9: note = short peptide
SSCPQQWIK

SEQ ID NO: 9030 - protein, 10 aa, synthetic construct
  REGION 1..10: note = short peptide
AQCPFLGPPR

SEQ ID NO: 9031 - protein, 15 aa, synthetic construct
  REGION 1..15: note = short peptide
IEGNLIFDPNNYLPK

SEQ ID NO: 9032 - protein, 10 aa, synthetic construct
  REGION 1..10: note = short peptide
KTATAVAHCK

SEQ ID NO: 9033 - protein, 9 aa, synthetic construct
  REGION 1..9: note = short peptide
PQTGVPPPQ

SEQ ID NO: 9034 - protein, 9 aa, synthetic construct
  REGION 1..9: note = short peptide
NAYPYCRTV

SEQ ID NO: 9035 - protein, 9 aa, synthetic construct
  REGION 1..9: note = short peptide
SKIHVLLLV

SEQ ID NO: 9036 - protein, 9 aa, synthetic construct
  REGION 1..9: note = short peptide
RVMKALVNR

SEQ ID NO: 9037 - protein, 12 aa, synthetic construct
  REGION 1..12: note = short peptide
RCKHFELGGDKK

SEQ ID NO: 9038 - protein, 9 aa, synthetic construct
  REGION 1..9: note = short peptide
MPVIPMNTI

SEQ ID NO: 9039 - protein, 12 aa, synthetic construct
  REGION 1..12: note = short peptide
KKAKKAGATAGK

SEQ ID NO: 9040 - protein, 15 aa, synthetic construct
  REGION 1..15: note = short peptide
IEGNLIFDPNNYLPK

SEQ ID NO: 9041 - protein, 8 aa, synthetic construct
  REGION 1..8: note = short peptide
DGPMLSLS

SEQ ID NO: 9042 - protein, 10 aa, synthetic construct
  REGION 1..10: note = short peptide
SVIGSSCLIK

SEQ ID NO: 9043 - protein, 8 aa, synthetic construct
  REGION 1..8: note = short peptide
AEVQMSVK

SEQ ID NO: 9044 - protein, 8 aa, synthetic construct
  REGION 1..8: note = short peptide
VPFQVKCV

SEQ ID NO: 9045 - protein, 10 aa, synthetic construct
  REGION 1..10: note = short peptide
KTATAVAHCK

SEQ ID NO: 9046 - protein, 9 aa, synthetic construct
  REGION 1..9: note = short peptide
NAYPYCRTV

SEQ ID NO: 9047 - protein, 15 aa, synthetic construct
  REGION 1..15: note = short peptide
IEGNLIFDPNNYLPK

SEQ ID NO: 9048 - protein, 9 aa, synthetic construct
  REGION 1..9: note = short peptide
KTSVHNLSK

SEQ ID NO: 9049 - protein, 9 aa, synthetic construct
  REGION 1..9: note = short peptide
GHDIPQYIH

SEQ ID NO: 9050 - protein, 10 aa, synthetic construct
  REGION 1..10: note = short peptide
RTPSPAPKRK

SEQ ID NO: 9051 - protein, 9 aa, synthetic construct
  REGION 1..9: note = short peptide
SICGKTFNK

SEQ ID NO: 9052 - protein, 9 aa, synthetic construct
  REGION 1..9: note = short peptide
MPLGTIHCI

SEQ ID NO: 9053 - protein, 9 aa, synthetic construct
  REGION 1..9: note = short peptide
SYHNQTISF

SEQ ID NO: 9054 - protein, 8 aa, synthetic construct
  REGION 1..8: note = short peptide
RLCRLWPR

SEQ ID NO: 9055 - protein, 9 aa, synthetic construct
  REGION 1..9: note = short peptide
SYHNQTISF

SEQ ID NO: 9056 - protein, 14 aa, synthetic construct
  REGION 1..14: note = short peptide
AQQAADKYLYVDKN

SEQ ID NO: 9057 - protein, 8 aa, synthetic construct
  REGION 1..8: note = short peptide
DAPCVVKV

SEQ ID NO: 9058 - protein, 9 aa, synthetic construct
  REGION 1..9: note = short peptide
PYPKKPPNQ

SEQ ID NO: 9059 - protein, 8 aa, synthetic construct
  REGION 1..8: note = short peptide
KPVIPNLL

SEQ ID NO: 9060 - protein, 11 aa, synthetic construct
  REGION 1..11: note = short peptide
KSAPATGGVKK

SEQ ID NO: 9061 - protein, 8 aa, synthetic construct
  REGION 1..8: note = short peptide
IGNLGLVV

SEQ ID NO: 9062 - protein, 11 aa, synthetic construct
  REGION 1..11: note = short peptide
YAYDGKDYIAL

SEQ ID NO: 9063 - protein, 8 aa, synthetic construct
  REGION 1..8: note = short peptide
DAPRTLCV

SEQ ID NO: 9064 - protein, 11 aa, synthetic construct
  REGION 1..11: note = short peptide
YAYDGKDYLAL

SEQ ID NO: 9065 - protein, 9 aa, synthetic construct
  REGION 1..9: note = short peptide
ILDKKVEKV

SEQ ID NO: 9066 - protein, 11 aa, synthetic construct
  REGION 1..11: note = short peptide
SSKKAKTKTTK

SEQ ID NO: 9067 - protein, 15 aa, synthetic construct
  REGION 1..15: note = short peptide
QKSYKVSTSGPRAFS

SEQ ID NO: 9068 - protein, 11 aa, synthetic construct
  REGION 1..11: note = short peptide
ATDELATKLSR

SEQ ID NO: 9069 - protein, 14 aa, synthetic construct
  REGION 1..14: note = short peptide
GKVTKSAQKAQKAK

SEQ ID NO: 9070 - protein, 10 aa, synthetic construct
  REGION 1..10: note = short peptide
FINIPVLDIK

SEQ ID NO: 9071 - protein, 10 aa, synthetic construct
  REGION 1..10: note = short peptide
FINIPVLDIK

SEQ ID NO: 9072 - protein, 9 aa, synthetic construct
  REGION 1..9: note = short peptide
TVNHVSLIL

SEQ ID NO: 9073 - protein, 9 aa, synthetic construct
  REGION 1..9: note = short peptide
KLNDTYVNV

SEQ ID NO: 9074 - protein, 10 aa, synthetic construct
  REGION 1..10: note = short peptide
TLTGPKSPTV

SEQ ID NO: 9075 - protein, 9 aa, synthetic construct
  REGION 1..9: note = short peptide
TMGPRPAAA

SEQ ID NO: 9076 - protein, 10 aa, synthetic construct
  REGION 1..10: note = short peptide
SIRVTQKSYK

SEQ ID NO: 9077 - protein, 8 aa, synthetic construct
  REGION 1..8: note = short peptide
AQQAADKY

SEQ ID NO: 9078 - protein, 12 aa, synthetic construct
  REGION 1..12: note = short peptide
ASGVAVSDGVIK

SEQ ID NO: 9079 - protein, 14 aa, synthetic construct
  REGION 1..14: note = short peptide
AEVEQKKKRTFRKF

SEQ ID NO: 9080 - protein, 10 aa, synthetic construct
  REGION 1..10: note = short peptide
KSAPATGGVK

SEQ ID NO: 9081 - protein, 13 aa, synthetic construct
  REGION 1..13: note = short peptide
SDKPDMAEIEKFD

SEQ ID NO: 9082 - protein, 14 aa, synthetic construct
  REGION 1..14: note = short peptide
KPEPPAMPQPVPTA

SEQ ID NO: 9083 - protein, 10 aa, synthetic construct
  REGION 1..10: note = short peptide
KIFTQKSQLK

SEQ ID NO: 9084 - protein, 10 aa, synthetic construct
  REGION 1..10: note = short peptide
KIFTQKSQLK

SEQ ID NO: 9085 - protein, 13 aa, synthetic construct
  REGION 1..13: note = short peptide
YGGGRGGYGGGGP

SEQ ID NO: 9086 - protein, 9 aa, synthetic construct
  REGION 1..9: note = short peptide
SVKPAVDPA

SEQ ID NO: 9087 - protein, 14 aa, synthetic construct
  REGION 1..14: note = short peptide
GLTGSPGSPGPDGK

SEQ ID NO: 9088 - protein, 15 aa, synthetic construct
  REGION 1..15: note = short peptide
SDAAVDTSSEITTKD

SEQ ID NO: 9089 - protein, 15 aa, synthetic construct
  REGION 1..15: note = short peptide
DLKLQKKTLNLNAPT

SEQ ID NO: 9090 - protein, 15 aa, synthetic construct
  REGION 1..15: note = short peptide
DLKLQKKTLNLNAPT

SEQ ID NO: 9091 - protein, 11 aa, synthetic construct
  REGION 1..11: note = short peptide
SDFLACKICLE

SEQ ID NO: 9092 - protein, 15 aa, synthetic construct
  REGION 1..15: note = short peptide
GIPGPVGAAGATGAR

SEQ ID NO: 9093 - protein, 9 aa, synthetic construct
  REGION 1..9: note = short peptide
FPDKPITQY

SEQ ID NO: 9094 - protein, 9 aa, synthetic construct
  REGION 1..9: note = short peptide
KVYTPVASR

SEQ ID NO: 9095 - protein, 11 aa, synthetic construct
  REGION 1..11: note = short peptide
SVRYSSSKHYS

SEQ ID NO: 9096 - protein, 10 aa, synthetic construct
  REGION 1..10: note = short peptide
AEGDNRSTNL

SEQ ID NO: 9097 - protein, 9 aa, synthetic construct
  REGION 1..9: note = short peptide
DLMVGLTPK

SEQ ID NO: 9098 - protein, 9 aa, synthetic construct
  REGION 1..9: note = short peptide
SVYGDFSCK

SEQ ID NO: 9099 - protein, 9 aa, synthetic construct
  REGION 1..9: note = short peptide
YPIEHGIVT

SEQ ID NO: 9100 - protein, 11 aa, synthetic construct
  REGION 1..11: note = short peptide
TERRVPFSLLR

SEQ ID NO: 9101 - protein, 9 aa, synthetic construct
  REGION 1..9: note = short peptide
NAINITSAL

SEQ ID NO: 9102 - protein, 9 aa, synthetic construct
  REGION 1..9: note = short peptide
LLFDRPMHV

SEQ ID NO: 9103 - protein, 9 aa, synthetic construct
  REGION 1..9: note = short peptide
ILVNITEKV

SEQ ID NO: 9104 - protein, 11 aa, synthetic construct
  REGION 1..11: note = short peptide
TPISPGRASGM

SEQ ID NO: 9105 - protein, 10 aa, synthetic construct
  REGION 1..10: note = short peptide
HEAQLKNGSL

SEQ ID NO: 9106 - protein, 9 aa, synthetic construct
  REGION 1..9: note = short peptide
KLLNGSQRV

SEQ ID NO: 9107 - protein, 9 aa, synthetic construct
  REGION 1..9: note = short peptide
YLYDLNHTL

SEQ ID NO: 9108 - protein, 9 aa, synthetic construct
  REGION 1..9: note = short peptide
SFNDTFVHV

SEQ ID NO: 9109 - protein, 12 aa, synthetic construct
  REGION 1..12: note = short peptide
STYKRATLDEED

SEQ ID NO: 9110 - protein, 8 aa, synthetic construct
  REGION 1..8: note = short peptide
PPSSHDAA

SEQ ID NO: 9111 - protein, 10 aa, synthetic construct
  REGION 1..10: note = short peptide
YIYDKDMEII

SEQ ID NO: 9112 - protein, 10 aa, synthetic construct
  REGION 1..10: note = short peptide
CEIDLEIKRY

SEQ ID NO: 9113 - protein, 11 aa, synthetic construct
  REGION 1..11: note = short peptide
VLLDVNGHIRL

SEQ ID NO: 9114 - protein, 13 aa, synthetic construct
  REGION 1..13: note = short peptide
TKGGDAPAAGEDA

SEQ ID NO: 9115 - protein, 8 aa, synthetic construct
  REGION 1..8: note = short peptide
KEQRLQAV

SEQ ID NO: 9116 - protein, 11 aa, synthetic construct
  REGION 1..11: note = short peptide
AKCQHIFVNFH

SEQ ID NO: 9117 - protein, 9 aa, synthetic construct
  REGION 1..9: note = short peptide
MPAAGGVLY

SEQ ID NO: 9118 - protein, 9 aa, synthetic construct
  REGION 1..9: note = short peptide
EELSPTAKF

SEQ ID NO: 9119 - protein, 9 aa, synthetic construct
  REGION 1..9: note = short peptide
SMMSPMADR

SEQ ID NO: 9120 - protein, 10 aa, synthetic construct
  REGION 1..10: note = short peptide
KNVPCSHRPK

SEQ ID NO: 9121 - protein, 14 aa, synthetic construct
  REGION 1..14: note = short peptide
NPKVLSEKQNAEGE

SEQ ID NO: 9122 - protein, 10 aa, synthetic construct
  REGION 1..10: note = short peptide
KLREPNFTLK

SEQ ID NO: 9123 - protein, 10 aa, synthetic construct
  REGION 1..10: note = short peptide
AEMGKGSFKY

SEQ ID NO: 9124 - protein, 10 aa, synthetic construct
  REGION 1..10: note = short peptide
AEMGKGSFKY

SEQ ID NO: 9125 - protein, 12 aa, synthetic construct
  REGION 1..12: note = short peptide
AEMGKGSFKYAW

SEQ ID NO: 9126 - protein, 15 aa, synthetic construct
  REGION 1..15: note = short peptide
TPKIQVYSRHPAENG

SEQ ID NO: 9127 - protein, 12 aa, synthetic construct
  REGION 1..12: note = short peptide
ASTSTTIRSHSS

SEQ ID NO: 9128 - protein, 10 aa, synthetic construct
  REGION 1..10: note = short peptide
DEMARHLREY

SEQ ID NO: 9129 - protein, 13 aa, synthetic construct
  REGION 1..13: note = short peptide
LPYLEHVGHNHTY

SEQ ID NO: 9130 - protein, 9 aa, synthetic construct
  REGION 1..9: note = short peptide
NIHSIVVQV

SEQ ID NO: 9131 - protein, 9 aa, synthetic construct
  REGION 1..9: note = short peptide
KLTGVLCEV

SEQ ID NO: 9132 - protein, 12 aa, synthetic construct
  REGION 1..12: note = short peptide
AEMGKGSFKYAW

SEQ ID NO: 9133 - protein, 11 aa, synthetic construct
  REGION 1..11: note = short peptide
RVKTPTSQSYR

SEQ ID NO: 9134 - protein, 8 aa, synthetic construct
  REGION 1..8: note = short peptide
HPETQQTF

SEQ ID NO: 9135 - protein, 9 aa, synthetic construct
  REGION 1..9: note = short peptide
RGGGPIRNR

SEQ ID NO: 9136 - protein, 9 aa, synthetic construct
  REGION 1..9: note = short peptide
AQQAADKYL

SEQ ID NO: 9137 - protein, 9 aa, synthetic construct
  REGION 1..9: note = short peptide
KYAWVLDKL

SEQ ID NO: 9138 - protein, 10 aa, synthetic construct
  REGION 1..10: note = short peptide
DDDIAALVVD

SEQ ID NO: 9139 - protein, 9 aa, synthetic construct
  REGION 1..9: note = short peptide
KFIDTTSKF

SEQ ID NO: 9140 - protein, 9 aa, synthetic construct
  REGION 1..9: note = short peptide
LPRQPPMSL

SEQ ID NO: 9141 - protein, 9 aa, synthetic construct
  REGION 1..9: note = short peptide
IEHGIVTNW

SEQ ID NO: 9142 - protein, 9 aa, synthetic construct
  REGION 1..9: note = short peptide
IEHGIVTNW

SEQ ID NO: 9143 - protein, 8 aa, synthetic construct
  REGION 1..8: note = short peptide
MMGHRPVL

SEQ ID NO: 9144 - protein, 10 aa, synthetic construct
  REGION 1..10: note = short peptide
KLPDDYRCSY

SEQ ID NO: 9145 - protein, 11 aa, synthetic construct
  REGION 1..11: note = short peptide
REIAQDFKTDL

SEQ ID NO: 9146 - protein, 9 aa, synthetic construct
  REGION 1..9: note = short peptide
SNSTRMALF

SEQ ID NO: 9147 - protein, 15 aa, synthetic construct
  REGION 1..15: note = short peptide
VHKAVLTIDEKGTEA

SEQ ID NO: 9148 - protein, 8 aa, synthetic construct
  REGION 1..8: note = short peptide
YPVCVSKV

SEQ ID NO: 9149 - protein, 9 aa, synthetic construct
  REGION 1..9: note = short peptide
KNQNKKHYG

SEQ ID NO: 9150 - protein, 9 aa, synthetic construct
  REGION 1..9: note = short peptide
KNQNKKHYG

SEQ ID NO: 9151 - protein, 11 aa, synthetic construct
  REGION 1..11: note = short peptide
AAQSAPKVVLK

SEQ ID NO: 9152 - protein, 9 aa, synthetic construct
  REGION 1..9: note = short peptide
APRLALKCL

SEQ ID NO: 9153 - protein, 9 aa, synthetic construct
  REGION 1..9: note = short peptide
MPYKGMTTV

SEQ ID NO: 9154 - protein, 9 aa, synthetic construct
  REGION 1..9: note = short peptide
AVKKKFCTF

SEQ ID NO: 9155 - protein, 10 aa, synthetic construct
  REGION 1..10: note = short peptide
RTGEGFLCVF

SEQ ID NO: 9156 - protein, 9 aa, synthetic construct
  REGION 1..9: note = short peptide
IPPKKTGKI

SEQ ID NO: 9157 - protein, 9 aa, synthetic construct
  REGION 1..9: note = short peptide
RYGDCHPVF

SEQ ID NO: 9158 - protein, 9 aa, synthetic construct
  REGION 1..9: note = short peptide
CYPLNNHLF

SEQ ID NO: 9159 - protein, 10 aa, synthetic construct
  REGION 1..10: note = short peptide
TSRFGKTYSR

SEQ ID NO: 9160 - protein, 9 aa, synthetic construct
  REGION 1..9: note = short peptide
SDPPISESL

SEQ ID NO: 9161 - protein, 15 aa, synthetic construct
  REGION 1..15: note = short peptide
ALKRINKELSDLARD

SEQ ID NO: 9162 - protein, 10 aa, synthetic construct
  REGION 1..10: note = short peptide
KELSGHLPAL

SEQ ID NO: 9163 - protein, 10 aa, synthetic construct
  REGION 1..10: note = short peptide
GIGRGIALQL

SEQ ID NO: 9164 - protein, 10 aa, synthetic construct
  REGION 1..10: note = short peptide
KMPKMKMPTF

SEQ ID NO: 9165 - protein, 9 aa, synthetic construct
  REGION 1..9: note = short peptide
VLPQRFPQF

SEQ ID NO: 9166 - protein, 9 aa, synthetic construct
  REGION 1..9: note = short peptide
LPQNKVNIS

SEQ ID NO: 9167 - protein, 9 aa, synthetic construct
  REGION 1..9: note = short peptide
GRYSLNVTY

SEQ ID NO: 9168 - protein, 14 aa, synthetic construct
  REGION 1..14: note = short peptide
LKNNLCPSGSNIIS

SEQ ID NO: 9169 - protein, 9 aa, synthetic construct
  REGION 1..9: note = short peptide
LPQNKVNIS

SEQ ID NO: 9170 - protein, 15 aa, synthetic construct
  REGION 1..15: note = short peptide
QGQKKVEELEGEITT

SEQ ID NO: 9171 - protein, 9 aa, synthetic construct
  REGION 1..9: note = short peptide
AAAARAAAL

SEQ ID NO: 9172 - protein, 9 aa, synthetic construct
  REGION 1..9: note = short peptide
VPSDPGGVL

SEQ ID NO: 9173 - protein, 8 aa, synthetic construct
  REGION 1..8: note = short peptide
DAQKILCI

SEQ ID NO: 9174 - protein, 9 aa, synthetic construct
  REGION 1..9: note = short peptide
VYKCLSENI

SEQ ID NO: 9175 - protein, 9 aa, synthetic construct
  REGION 1..9: note = short peptide
GPRGSGPPM

SEQ ID NO: 9176 - protein, 9 aa, synthetic construct
  REGION 1..9: note = short peptide
VFHNHTYHL

SEQ ID NO: 9177 - protein, 9 aa, synthetic construct
  REGION 1..9: note = short peptide
MPNVKVAVF

SEQ ID NO: 9178 - protein, 9 aa, synthetic construct
  REGION 1..9: note = short peptide
KFIDTTSKF

SEQ ID NO: 9179 - protein, 9 aa, synthetic construct
  REGION 1..9: note = short peptide
LPRKTHRGL

SEQ ID NO: 9180 - protein, 9 aa, synthetic construct
  REGION 1..9: note = short peptide
RDTSMVHEL

SEQ ID NO: 9181 - protein, 12 aa, synthetic construct
  REGION 1..12: note = short peptide
RPRSLSSPTVTL

SEQ ID NO: 9182 - protein, 8 aa, synthetic construct
  REGION 1..8: note = short peptide
ARGPLKCV

SEQ ID NO: 9183 - protein, 9 aa, synthetic construct
  REGION 1..9: note = short peptide
SLKDRIHCV

SEQ ID NO: 9184 - protein, 9 aa, synthetic construct
  REGION 1..9: note = short peptide
KYISKPENL

SEQ ID NO: 9185 - protein, 8 aa, synthetic construct
  REGION 1..8: note = short peptide
MPSRLPIQ

SEQ ID NO: 9186 - protein, 12 aa, synthetic construct
  REGION 1..12: note = short peptide
VELLNIIPLIPP

SEQ ID NO: 9187 - protein, 9 aa, synthetic construct
  REGION 1..9: note = short peptide
IEHGIITNW

SEQ ID NO: 9188 - protein, 8 aa, synthetic construct
  REGION 1..8: note = short peptide
KIDKVNEI

SEQ ID NO: 9189 - protein, 9 aa, synthetic construct
  REGION 1..9: note = short peptide
RQKGGYCSW

SEQ ID NO: 9190 - protein, 12 aa, synthetic construct
  REGION 1..12: note = short peptide
VELLNIIPLIPP

SEQ ID NO: 9191 - protein, 9 aa, synthetic construct
  REGION 1..9: note = short peptide
IEHGIITNW

SEQ ID NO: 9192 - protein, 9 aa, synthetic construct
  REGION 1..9: note = short peptide
KVFSGKSER

SEQ ID NO: 9193 - protein, 8 aa, synthetic construct
  REGION 1..8: note = short peptide
YGMPRQIL

SEQ ID NO: 9194 - protein, 9 aa, synthetic construct
  REGION 1..9: note = short peptide
KVMDEVAGI

SEQ ID NO: 9195 - protein, 9 aa, synthetic construct
  REGION 1..9: note = short peptide
DAPYPVCTV

SEQ ID NO: 9196 - protein, 9 aa, synthetic construct
  REGION 1..9: note = short peptide
SPTCTNKEL

SEQ ID NO: 9197 - protein, 8 aa, synthetic construct
  REGION 1..8: note = short peptide
HLGKGHLL

SEQ ID NO: 9198 - protein, 11 aa, synthetic construct
  REGION 1..11: note = short peptide
SSKVSRDTLYE

SEQ ID NO: 9199 - protein, 8 aa, synthetic construct
  REGION 1..8: note = short peptide
GYIPQAFP

SEQ ID NO: 9200 - protein, 10 aa, synthetic construct
  REGION 1..10: note = short peptide
RYFDPANGKF

SEQ ID NO: 9201 - protein, 15 aa, synthetic construct
  REGION 1..15: note = short peptide
SLVSKGTLVQTKGTG

SEQ ID NO: 9202 - protein, 15 aa, synthetic construct
  REGION 1..15: note = short peptide
LANIAVDKANLEIMT

SEQ ID NO: 9203 - protein, 9 aa, synthetic construct
  REGION 1..9: note = short peptide
SLGNVNFTV

SEQ ID NO: 9204 - protein, 9 aa, synthetic construct
  REGION 1..9: note = short peptide
MYAPVCTVL

SEQ ID NO: 9205 - protein, 8 aa, synthetic construct
  REGION 1..8: note = short peptide
LQDVKHAL

SEQ ID NO: 9206 - protein, 10 aa, synthetic construct
  REGION 1..10: note = short peptide
SEDKQLAVCL

SEQ ID NO: 9207 - protein, 9 aa, synthetic construct
  REGION 1..9: note = short peptide
SNSTKFSLF

SEQ ID NO: 9208 - protein, 8 aa, synthetic construct
  REGION 1..8: note = short peptide
RPRARGHL

SEQ ID NO: 9209 - protein, 10 aa, synthetic construct
  REGION 1..10: note = short peptide
KEKYIDQEEL

SEQ ID NO: 9210 - protein, 8 aa, synthetic construct
  REGION 1..8: note = short peptide
KQRLLNGY

SEQ ID NO: 9211 - protein, 10 aa, synthetic construct
  REGION 1..10: note = short peptide
AEVNKTFQEL

SEQ ID NO: 9212 - protein, 9 aa, synthetic construct
  REGION 1..9: note = short peptide
VRKSGKHVT

SEQ ID NO: 9213 - protein, 10 aa, synthetic construct
  REGION 1..10: note = short peptide
KWNPTAGVAF

SEQ ID NO: 9214 - protein, 9 aa, synthetic construct
  REGION 1..9: note = short peptide
ALNDSRYCL

SEQ ID NO: 9215 - protein, 9 aa, synthetic construct
  REGION 1..9: note = short peptide
VRKSGKHVT

SEQ ID NO: 9216 - protein, 10 aa, synthetic construct
  REGION 1..10: note = short peptide
KWNPTAGVAF

SEQ ID NO: 9217 - protein, 9 aa, synthetic construct
  REGION 1..9: note = short peptide
ALNDSRYCL

SEQ ID NO: 9218 - protein, 9 aa, synthetic construct
  REGION 1..9: note = short peptide
ALNDSRYCL

SEQ ID NO: 9219 - protein, 9 aa, synthetic construct
  REGION 1..9: note = short peptide
KYIDQKFVL

SEQ ID NO: 9220 - protein, 9 aa, synthetic construct
  REGION 1..9: note = short peptide
SNSTRMALF

SEQ ID NO: 9221 - protein, 9 aa, synthetic construct
  REGION 1..9: note = short peptide
QPRPPGISP

SEQ ID NO: 9222 - protein, 15 aa, synthetic construct
  REGION 1..15: note = short peptide
SNLRKAFEEAEKNAP

SEQ ID NO: 9223 - protein, 11 aa, synthetic construct
  REGION 1..11: note = short peptide
KEFDGKSLVSV

SEQ ID NO: 9224 - protein, 9 aa, synthetic construct
  REGION 1..9: note = short peptide
FYGDKMNLF

SEQ ID NO: 9225 - protein, 8 aa, synthetic construct
  REGION 1..8: note = short peptide
ANSTHHNV

SEQ ID NO: 9226 - protein, 13 aa, synthetic construct
  REGION 1..13: note = short peptide
MPYPGGQGEAERF

SEQ ID NO: 9227 - protein, 9 aa, synthetic construct
  REGION 1..9: note = short peptide
TYVPCLKTL

SEQ ID NO: 9228 - protein, 9 aa, synthetic construct
  REGION 1..9: note = short peptide
GEHCDFTIL

SEQ ID NO: 9229 - protein, 11 aa, synthetic construct
  REGION 1..11: note = short peptide
VYLPASSPCTL

SEQ ID NO: 9230 - protein, 11 aa, synthetic construct
  REGION 1..11: note = short peptide
SYVCPDLVKEF

SEQ ID NO: 9231 - protein, 9 aa, synthetic construct
  REGION 1..9: note = short peptide
KTFSCSYTL

SEQ ID NO: 9232 - protein, 9 aa, synthetic construct
  REGION 1..9: note = short peptide
LPDGGARLL

SEQ ID NO: 9233 - protein, 10 aa, synthetic construct
  REGION 1..10: note = short peptide
RGPSLGASSH

SEQ ID NO: 9234 - protein, 11 aa, synthetic construct
  REGION 1..11: note = short peptide
AAQGEPQVQFK

SEQ ID NO: 9235 - protein, 9 aa, synthetic construct
  REGION 1..9: note = short peptide
RVLYPRVVR

SEQ ID NO: 9236 - protein, 9 aa, synthetic construct
  REGION 1..9: note = short peptide
KYAWVLDKL

SEQ ID NO: 9237 - protein, 11 aa, synthetic construct
  REGION 1..11: note = short peptide
PYMDSPQSIGF

SEQ ID NO: 9238 - protein, 9 aa, synthetic construct
  REGION 1..9: note = short peptide
KTQPPLMKR

SEQ ID NO: 9239 - protein, 9 aa, synthetic construct
  REGION 1..9: note = short peptide
RYPDNLKHL

SEQ ID NO: 9240 - protein, 13 aa, synthetic construct
  REGION 1..13: note = short peptide
DHALKHFEETGHP

SEQ ID NO: 9241 - protein, 8 aa, synthetic construct
  REGION 1..8: note = short peptide
KKRNPILK

SEQ ID NO: 9242 - protein, 9 aa, synthetic construct
  REGION 1..9: note = short peptide
EFLRNQPQF

SEQ ID NO: 9243 - protein, 9 aa, synthetic construct
  REGION 1..9: note = short peptide
RDQIKNCGF

SEQ ID NO: 9244 - protein, 9 aa, synthetic construct
  REGION 1..9: note = short peptide
RMLEPLPCW

SEQ ID NO: 9245 - protein, 9 aa, synthetic construct
  REGION 1..9: note = short peptide
RLQELCYQW

SEQ ID NO: 9246 - protein, 9 aa, synthetic construct
  REGION 1..9: note = short peptide
KEKLCYVAL

SEQ ID NO: 9247 - protein, 9 aa, synthetic construct
  REGION 1..9: note = short peptide
KELQKSCTF

SEQ ID NO: 9248 - protein, 9 aa, synthetic construct
  REGION 1..9: note = short peptide
GAAPCRLAL

SEQ ID NO: 9249 - protein, 9 aa, synthetic construct
  REGION 1..9: note = short peptide
RLHELCRQW

SEQ ID NO: 9250 - protein, 9 aa, synthetic construct
  REGION 1..9: note = short peptide
SPTCTNKEL

SEQ ID NO: 9251 - protein, 9 aa, synthetic construct
  REGION 1..9: note = short peptide
KYAWVLDKL

SEQ ID NO: 9252 - protein, 9 aa, synthetic construct
  REGION 1..9: note = short peptide
ALADAKALV

SEQ ID NO: 9253 - protein, 9 aa, synthetic construct
  REGION 1..9: note = short peptide
EPNPDDPLM

SEQ ID NO: 9254 - protein, 11 aa, synthetic construct
  REGION 1..11: note = short peptide
SNTQAERSIIG

SEQ ID NO: 9255 - protein, 9 aa, synthetic construct
  REGION 1..9: note = short peptide
KYINTDAKF

SEQ ID NO: 9256 - protein, 9 aa, synthetic construct
  REGION 1..9: note = short peptide
EEIAFLKKL

SEQ ID NO: 9257 - protein, 9 aa, synthetic construct
  REGION 1..9: note = short peptide
RNVTHHVSV

SEQ ID NO: 9258 - protein, 10 aa, synthetic construct
  REGION 1..10: note = short peptide
EGVLPGLGPP

SEQ ID NO: 9259 - protein, 10 aa, synthetic construct
  REGION 1..10: note = short peptide
KIMKDILEKK

SEQ ID NO: 9260 - protein, 9 aa, synthetic construct
  REGION 1..9: note = short peptide
VFIDKQTNL

SEQ ID NO: 9261 - protein, 11 aa, synthetic construct
  REGION 1..11: note = short peptide
GFSPRQIQVSW

SEQ ID NO: 9262 - protein, 11 aa, synthetic construct
  REGION 1..11: note = short peptide
KMKEALLSIGK

SEQ ID NO: 9263 - protein, 11 aa, synthetic construct
  REGION 1..11: note = short peptide
IEVDPDTKEML

SEQ ID NO: 9264 - protein, 10 aa, synthetic construct
  REGION 1..10: note = short peptide
KPPAPKTGSI

SEQ ID NO: 9265 - protein, 9 aa, synthetic construct
  REGION 1..9: note = short peptide
KDVDRIIGL

SEQ ID NO: 9266 - protein, 9 aa, synthetic construct
  REGION 1..9: note = short peptide
KLLDHTCVV

SEQ ID NO: 9267 - protein, 9 aa, synthetic construct
  REGION 1..9: note = short peptide
TEEVKFYQL

SEQ ID NO: 9268 - protein, 9 aa, synthetic construct
  REGION 1..9: note = short peptide
TEEVCRIYL

SEQ ID NO: 9269 - protein, 9 aa, synthetic construct
  REGION 1..9: note = short peptide
SECGPFIKL

SEQ ID NO: 9270 - protein, 10 aa, synthetic construct
  REGION 1..10: note = short peptide
AEVCPTPARL

SEQ ID NO: 9271 - protein, 9 aa, synthetic construct
  REGION 1..9: note = short peptide
YPDSPSACL

SEQ ID NO: 9272 - protein, 11 aa, synthetic construct
  REGION 1..11: note = short peptide
RYNENLSKYCI

SEQ ID NO: 9273 - protein, 11 aa, synthetic construct
  REGION 1..11: note = short peptide
RVCSNRHGLIR

SEQ ID NO: 9274 - protein, 10 aa, synthetic construct
  REGION 1..10: note = short peptide
SESQCRVVVL

SEQ ID NO: 9275 - protein, 9 aa, synthetic construct
  REGION 1..9: note = short peptide
GQSGIIYCF

SEQ ID NO: 9276 - protein, 9 aa, synthetic construct
  REGION 1..9: note = short peptide
ILHDDCAFL

SEQ ID NO: 9277 - protein, 10 aa, synthetic construct
  REGION 1..10: note = short peptide
STTGHCVHMR

SEQ ID NO: 9278 - protein, 8 aa, synthetic construct
  REGION 1..8: note = short peptide
YQKKKLCF

SEQ ID NO: 9279 - protein, 11 aa, synthetic construct
  REGION 1..11: note = short peptide
KYITQGQLLQF

SEQ ID NO: 9280 - protein, 9 aa, synthetic construct
  REGION 1..9: note = short peptide
KSTAPSLAL

SEQ ID NO: 9281 - protein, 9 aa, synthetic construct
  REGION 1..9: note = short peptide
GLNKKPMSL

SEQ ID NO: 9282 - protein, 9 aa, synthetic construct
  REGION 1..9: note = short peptide
SHPNKVKVY

SEQ ID NO: 9283 - protein, 11 aa, synthetic construct
  REGION 1..11: note = short peptide
GENETYPRALL

SEQ ID NO: 9284 - protein, 9 aa, synthetic construct
  REGION 1..9: note = short peptide
TDAAVSFAK

SEQ ID NO: 9285 - protein, 9 aa, synthetic construct
  REGION 1..9: note = short peptide
GFVGLGNVW

SEQ ID NO: 9286 - protein, 9 aa, synthetic construct
  REGION 1..9: note = short peptide
ALDPKLPHL

SEQ ID NO: 9287 - protein, 10 aa, synthetic construct
  REGION 1..10: note = short peptide
HEVGHERDSL

SEQ ID NO: 9288 - protein, 9 aa, synthetic construct
  REGION 1..9: note = short peptide
RPLRGAKTL

SEQ ID NO: 9289 - protein, 8 aa, synthetic construct
  REGION 1..8: note = short peptide
RRGRPPAL

SEQ ID NO: 9290 - protein, 9 aa, synthetic construct
  REGION 1..9: note = short peptide
AAAPAGPRL

SEQ ID NO: 9291 - protein, 13 aa, synthetic construct
  REGION 1..13: note = short peptide
ASGNARIGKPAPD

SEQ ID NO: 9292 - protein, 10 aa, synthetic construct
  REGION 1..10: note = short peptide
LPAPCTPLSL

SEQ ID NO: 9293 - protein, 9 aa, synthetic construct
  REGION 1..9: note = short peptide
YYNDCYAVL

SEQ ID NO: 9294 - protein, 10 aa, synthetic construct
  REGION 1..10: note = short peptide
HEAAACITGL

SEQ ID NO: 9295 - protein, 12 aa, synthetic construct
  REGION 1..12: note = short peptide
CYLDIDKGHVKF

SEQ ID NO: 9296 - protein, 9 aa, synthetic construct
  REGION 1..9: note = short peptide
CELIRHDVF

SEQ ID NO: 9297 - protein, 9 aa, synthetic construct
  REGION 1..9: note = short peptide
CPIKEVVLY

SEQ ID NO: 9298 - protein, 9 aa, synthetic construct
  REGION 1..9: note = short peptide
EYLDKYCSL

SEQ ID NO: 9299 - protein, 10 aa, synthetic construct
  REGION 1..10: note = short peptide
QECPIKEVVL

SEQ ID NO: 9300 - protein, 9 aa, synthetic construct
  REGION 1..9: note = short peptide
GETSIAECL

SEQ ID NO: 9301 - protein, 9 aa, synthetic construct
  REGION 1..9: note = short peptide
EALIRTCLL

SEQ ID NO: 9302 - protein, 8 aa, synthetic construct
  REGION 1..8: note = short peptide
LKGPILCF

SEQ ID NO: 9303 - protein, 10 aa, synthetic construct
  REGION 1..10: note = short peptide
KEALENCITL

SEQ ID NO: 9304 - protein, 11 aa, synthetic construct
  REGION 1..11: note = short peptide
CTKAGKAIVSR

SEQ ID NO: 9305 - protein, 11 aa, synthetic construct
  REGION 1..11: note = short peptide
NEECPTITRTY

SEQ ID NO: 9306 - protein, 9 aa, synthetic construct
  REGION 1..9: note = short peptide
APGDERQCL

SEQ ID NO: 9307 - protein, 9 aa, synthetic construct
  REGION 1..9: note = short peptide
RNKQPFSCR

SEQ ID NO: 9308 - protein, 9 aa, synthetic construct
  REGION 1..9: note = short peptide
RDLERGCHL

SEQ ID NO: 9309 - protein, 10 aa, synthetic construct
  REGION 1..10: note = short peptide
KPKPPSKVKS

SEQ ID NO: 9310 - protein, 9 aa, synthetic construct
  REGION 1..9: note = short peptide
KYQEVTNNL

SEQ ID NO: 9311 - protein, 10 aa, synthetic construct
  REGION 1..10: note = short peptide
SPRSPSGHPH

SEQ ID NO: 9312 - protein, 11 aa, synthetic construct
  REGION 1..11: note = short peptide
LSALGNVIAAL

SEQ ID NO: 9313 - protein, 9 aa, synthetic construct
  REGION 1..9: note = short peptide
AYLPVNESF

SEQ ID NO: 9314 - protein, 12 aa, synthetic construct
  REGION 1..12: note = short peptide
KYIDDKDVFQKF

SEQ ID NO: 9315 - protein, 15 aa, synthetic construct
  REGION 1..15: note = short peptide
AMGIMNSFVNDIFER

SEQ ID NO: 9316 - protein, 10 aa, synthetic construct
  REGION 1..10: note = short peptide
SYPCAKAPHF

SEQ ID NO: 9317 - protein, 9 aa, synthetic construct
  REGION 1..9: note = short peptide
AMYPIRSAY

SEQ ID NO: 9318 - protein, 10 aa, synthetic construct
  REGION 1..10: note = short peptide
DAMRLGAEVY

SEQ ID NO: 9319 - protein, 15 aa, synthetic construct
  REGION 1..15: note = short peptide
VDRYISKYELDKAFS

SEQ ID NO: 9320 - protein, 11 aa, synthetic construct
  REGION 1..11: note = short peptide
RTNGSALCTRC

SEQ ID NO: 9321 - protein, 13 aa, synthetic construct
  REGION 1..13: note = short peptide
QGYCAEHPEGGIC

SEQ ID NO: 9322 - protein, 9 aa, synthetic construct
  REGION 1..9: note = short peptide
GQKPWSQHY

SEQ ID NO: 9323 - protein, 9 aa, synthetic construct
  REGION 1..9: note = short peptide
RGQLLELSK

SEQ ID NO: 9324 - protein, 9 aa, synthetic construct
  REGION 1..9: note = short peptide
RLIKELAKY

SEQ ID NO: 9325 - protein, 9 aa, synthetic construct
  REGION 1..9: note = short peptide
RPAAPRPPF

SEQ ID NO: 9326 - protein, 11 aa, synthetic construct
  REGION 1..11: note = short peptide
REIAQDFKTDL

SEQ ID NO: 9327 - protein, 9 aa, synthetic construct
  REGION 1..9: note = short peptide
RRLSADIRL

SEQ ID NO: 9328 - protein, 10 aa, synthetic construct
  REGION 1..10: note = short peptide
EYPDRIMNTF

SEQ ID NO: 9329 - protein, 9 aa, synthetic construct
  REGION 1..9: note = short peptide
VQAPQIGAW

SEQ ID NO: 9330 - protein, 9 aa, synthetic construct
  REGION 1..9: note = short peptide
FNDPNAKEM

SEQ ID NO: 9331 - protein, 9 aa, synthetic construct
  REGION 1..9: note = short peptide
PKVLANHLL

SEQ ID NO: 9332 - protein, 8 aa, synthetic construct
  REGION 1..8: note = short peptide
PNLQKEDL

SEQ ID NO: 9333 - protein, 10 aa, synthetic construct
  REGION 1..10: note = short peptide
NEIEDTFRQF

SEQ ID NO: 9334 - protein, 10 aa, synthetic construct
  REGION 1..10: note = short peptide
ARYCDSLLKK

SEQ ID NO: 9335 - protein, 10 aa, synthetic construct
  REGION 1..10: note = short peptide
KFINYVKNCF

SEQ ID NO: 9336 - protein, 12 aa, synthetic construct
  REGION 1..12: note = short peptide
NNLCPSGSNIIS

SEQ ID NO: 9337 - protein, 15 aa, synthetic construct
  REGION 1..15: note = short peptide
IPCEKVSTLPAITLK

SEQ ID NO: 9338 - protein, 9 aa, synthetic construct
  REGION 1..9: note = short peptide
NRICKVLAV

SEQ ID NO: 9339 - protein, 11 aa, synthetic construct
  REGION 1..11: note = short peptide
NYLETGRGLCF

SEQ ID NO: 9340 - protein, 9 aa, synthetic construct
  REGION 1..9: note = short peptide
SQIPSVLVM

SEQ ID NO: 9341 - protein, 9 aa, synthetic construct
  REGION 1..9: note = short peptide
GEACGTVGL

SEQ ID NO: 9342 - protein, 9 aa, synthetic construct
  REGION 1..9: note = short peptide
RLFGCYIEL

SEQ ID NO: 9343 - protein, 9 aa, synthetic construct
  REGION 1..9: note = short peptide
RETDCGVHI

SEQ ID NO: 9344 - protein, 10 aa, synthetic construct
  REGION 1..10: note = short peptide
SEDPLQNLCL

SEQ ID NO: 9345 - protein, 9 aa, synthetic construct
  REGION 1..9: note = short peptide
SEAMGLFCL

SEQ ID NO: 9346 - protein, 8 aa, synthetic construct
  REGION 1..8: note = short peptide
RNSIVELR

SEQ ID NO: 9347 - protein, 9 aa, synthetic construct
  REGION 1..9: note = short peptide
RQKELACLR

SEQ ID NO: 9348 - protein, 9 aa, synthetic construct
  REGION 1..9: note = short peptide
AVYCKFHYK

SEQ ID NO: 9349 - protein, 10 aa, synthetic construct
  REGION 1..10: note = short peptide
AYLESFYKFC

SEQ ID NO: 9350 - protein, 8 aa, synthetic construct
  REGION 1..8: note = short peptide
DDDNFLGA

SEQ ID NO: 9351 - protein, 10 aa, synthetic construct
  REGION 1..10: note = short peptide
IEECISQIVL

SEQ ID NO: 9352 - protein, 9 aa, synthetic construct
  REGION 1..9: note = short peptide
AHDFNSVMY

SEQ ID NO: 9353 - protein, 9 aa, synthetic construct
  REGION 1..9: note = short peptide
AEQIGCVEL

SEQ ID NO: 9354 - protein, 10 aa, synthetic construct
  REGION 1..10: note = short peptide
ESGGFQVVTF

SEQ ID NO: 9355 - protein, 11 aa, synthetic construct
  REGION 1..11: note = short peptide
KTYGCVPVANK

SEQ ID NO: 9356 - protein, 11 aa, synthetic construct
  REGION 1..11: note = short peptide
RTNGSALCTRC

SEQ ID NO: 9357 - protein, 9 aa, synthetic construct
  REGION 1..9: note = short peptide
VQAPQIGAW

SEQ ID NO: 9358 - protein, 8 aa, synthetic construct
  REGION 1..8: note = short peptide
PNLQKEDL

SEQ ID NO: 9359 - protein, 9 aa, synthetic construct
  REGION 1..9: note = short peptide
VPLGVISRV

SEQ ID NO: 9360 - protein, 9 aa, synthetic construct
  REGION 1..9: note = short peptide
YSYFSPRTM

SEQ ID NO: 9361 - protein, 11 aa, synthetic construct
  REGION 1..11: note = short peptide
SEFHEKLVNTL

SEQ ID NO: 9362 - protein, 9 aa, synthetic construct
  REGION 1..9: note = short peptide
PRKPVAGAL

SEQ ID NO: 9363 - protein, 9 aa, synthetic construct
  REGION 1..9: note = short peptide
NTSLPRPAL

SEQ ID NO: 9364 - protein, 9 aa, synthetic construct
  REGION 1..9: note = short peptide
RGGGPIRNR

SEQ ID NO: 9365 - protein, 9 aa, synthetic construct
  REGION 1..9: note = short peptide
RLKPFGVQR

SEQ ID NO: 9366 - protein, 9 aa, synthetic construct
  REGION 1..9: note = short peptide
LYAEKVATR

SEQ ID NO: 9367 - protein, 15 aa, synthetic construct
  REGION 1..15: note = short peptide
LQGAGGAACLGKVSS

SEQ ID NO: 9368 - protein, 13 aa, synthetic construct
  REGION 1..13: note = short peptide
TNKVASQKGMSVY

SEQ ID NO: 9369 - protein, 11 aa, synthetic construct
  REGION 1..11: note = short peptide
TEIDEKEYISL

SEQ ID NO: 9370 - protein, 15 aa, synthetic construct
  REGION 1..15: note = short peptide
SPGERHGSRHQQSAD

SEQ ID NO: 9371 - protein, 10 aa, synthetic construct
  REGION 1..10: note = short peptide
SVRNSGSCLC

SEQ ID NO: 9372 - protein, 8 aa, synthetic construct
  REGION 1..8: note = short peptide
STGGKAPR

SEQ ID NO: 9373 - protein, 9 aa, synthetic construct
  REGION 1..9: note = short peptide
GDLETVKQL

SEQ ID NO: 9374 - protein, 9 aa, synthetic construct
  REGION 1..9: note = short peptide
KNKNLQEAL

SEQ ID NO: 9375 - protein, 9 aa, synthetic construct
  REGION 1..9: note = short peptide
KCRGDVYLL

SEQ ID NO: 9376 - protein, 11 aa, synthetic construct
  REGION 1..11: note = short peptide
APGSALSPAGV

SEQ ID NO: 9377 - protein, 9 aa, synthetic construct
  REGION 1..9: note = short peptide
APAPAAARK

SEQ ID NO: 9378 - protein, 15 aa, synthetic construct
  REGION 1..15: note = short peptide
AVHKAVLTIDEKGTE

SEQ ID NO: 9379 - protein, 14 aa, synthetic construct
  REGION 1..14: note = short peptide
DSGDGVTHTVPIYD

SEQ ID NO: 9380 - protein, 10 aa, synthetic construct
  REGION 1..10: note = short peptide
AEQPICKEVL

SEQ ID NO: 9381 - protein, 9 aa, synthetic construct
  REGION 1..9: note = short peptide
TENGIRVDI

SEQ ID NO: 9382 - protein, 9 aa, synthetic construct
  REGION 1..9: note = short peptide
LANKRINAM

SEQ ID NO: 9383 - protein, 9 aa, synthetic construct
  REGION 1..9: note = short peptide
KDSPVLSCF

SEQ ID NO: 9384 - protein, 9 aa, synthetic construct
  REGION 1..9: note = short peptide
TLAECIDSV

SEQ ID NO: 9385 - protein, 10 aa, synthetic construct
  REGION 1..10: note = short peptide
KEICNAYTEL

SEQ ID NO: 9386 - protein, 9 aa, synthetic construct
  REGION 1..9: note = short peptide
RSLLLPSCR

SEQ ID NO: 9387 - protein, 9 aa, synthetic construct
  REGION 1..9: note = short peptide
REPVGTCFL

SEQ ID NO: 9388 - protein, 12 aa, synthetic construct
  REGION 1..12: note = short peptide
GEAPPGTPPCRL

SEQ ID NO: 9389 - protein, 10 aa, synthetic construct
  REGION 1..10: note = short peptide
VENVPCIVTL

SEQ ID NO: 9390 - protein, 9 aa, synthetic construct
  REGION 1..9: note = short peptide
SEAKDITCL

SEQ ID NO: 9391 - protein, 9 aa, synthetic construct
  REGION 1..9: note = short peptide
RDSPKCYKL

SEQ ID NO: 9392 - protein, 9 aa, synthetic construct
  REGION 1..9: note = short peptide
RYLTPLVCL

SEQ ID NO: 9393 - protein, 9 aa, synthetic construct
  REGION 1..9: note = short peptide
HPHHCNVTY

SEQ ID NO: 9394 - protein, 10 aa, synthetic construct
  REGION 1..10: note = short peptide
AECGPPPFFL

SEQ ID NO: 9395 - protein, 9 aa, synthetic construct
  REGION 1..9: note = short peptide
KSANICIGR

SEQ ID NO: 9396 - protein, 9 aa, synthetic construct
  REGION 1..9: note = short peptide
IPQDQLVVM

SEQ ID NO: 9397 - protein, 15 aa, synthetic construct
  REGION 1..15: note = short peptide
LQGAGGAACLGKVSS

SEQ ID NO: 9398 - protein, 9 aa, synthetic construct
  REGION 1..9: note = short peptide
RNVTHHVSV

SEQ ID NO: 9399 - protein, 8 aa, synthetic construct
  REGION 1..8: note = short peptide
CLKILKAI

SEQ ID NO: 9400 - protein, 11 aa, synthetic construct
  REGION 1..11: note = short peptide
KYLEESTIRHF

SEQ ID NO: 9401 - protein, 8 aa, synthetic construct
  REGION 1..8: note = short peptide
CKKNKFGA

SEQ ID NO: 9402 - protein, 9 aa, synthetic construct
  REGION 1..9: note = short peptide
REDNNTNRL

SEQ ID NO: 9403 - protein, 9 aa, synthetic construct
  REGION 1..9: note = short peptide
RDSSPKVRF

SEQ ID NO: 9404 - protein, 9 aa, synthetic construct
  REGION 1..9: note = short peptide
EYVEKFYRI

SEQ ID NO: 9405 - protein, 9 aa, synthetic construct
  REGION 1..9: note = short peptide
SHKGSIIVK

SEQ ID NO: 9406 - protein, 8 aa, synthetic construct
  REGION 1..8: note = short peptide
STYLMSLL

SEQ ID NO: 9407 - protein, 9 aa, synthetic construct
  REGION 1..9: note = short peptide
SPDHSDHTL

SEQ ID NO: 9408 - protein, 11 aa, synthetic construct
  REGION 1..11: note = short peptide
RYKPDLKEGSR

SEQ ID NO: 9409 - protein, 10 aa, synthetic construct
  REGION 1..10: note = short peptide
KYFDQVDISN

SEQ ID NO: 9410 - protein, 10 aa, synthetic construct
  REGION 1..10: note = short peptide
TEVKVEPMTY

SEQ ID NO: 9411 - protein, 9 aa, synthetic construct
  REGION 1..9: note = short peptide
KFLWEELEL

SEQ ID NO: 9412 - protein, 9 aa, synthetic construct
  REGION 1..9: note = short peptide
VPASQVRSL

SEQ ID NO: 9413 - protein, 9 aa, synthetic construct
  REGION 1..9: note = short peptide
LSQSMAITY

SEQ ID NO: 9414 - protein, 9 aa, synthetic construct
  REGION 1..9: note = short peptide
KLNENIKIL

SEQ ID NO: 9415 - protein, 8 aa, synthetic construct
  REGION 1..8: note = short peptide
PRQPPMSL

SEQ ID NO: 9416 - protein, 15 aa, synthetic construct
  REGION 1..15: note = short peptide
KTLPRSSSMAAGLER

SEQ ID NO: 9417 - protein, 10 aa, synthetic construct
  REGION 1..10: note = short peptide
KLTECLAGAI

SEQ ID NO: 9418 - protein, 8 aa, synthetic construct
  REGION 1..8: note = short peptide
KAKKAMVF

SEQ ID NO: 9419 - protein, 10 aa, synthetic construct
  REGION 1..10: note = short peptide
RVQPRAPCLR

SEQ ID NO: 9420 - protein, 9 aa, synthetic construct
  REGION 1..9: note = short peptide
RETEHCVSL

SEQ ID NO: 9421 - protein, 9 aa, synthetic construct
  REGION 1..9: note = short peptide
GGKLQLVCF

SEQ ID NO: 9422 - protein, 9 aa, synthetic construct
  REGION 1..9: note = short peptide
GEYHCVYHF

SEQ ID NO: 9423 - protein, 9 aa, synthetic construct
  REGION 1..9: note = short peptide
GENDVIGCF

SEQ ID NO: 9424 - protein, 9 aa, synthetic construct
  REGION 1..9: note = short peptide
GARLISVCY

SEQ ID NO: 9425 - protein, 10 aa, synthetic construct
  REGION 1..10: note = short peptide
KYFDQVDISN

SEQ ID NO: 9426 - protein, 9 aa, synthetic construct
  REGION 1..9: note = short peptide
KLNENIKIL

SEQ ID NO: 9427 - protein, 10 aa, synthetic construct
  REGION 1..10: note = short peptide
AVHCMGILVK

SEQ ID NO: 9428 - protein, 13 aa, synthetic construct
  REGION 1..13: note = short peptide
SPRNGLQEKHKSL

SEQ ID NO: 9429 - protein, 10 aa, synthetic construct
  REGION 1..10: note = short peptide
RSRSPSGSPR

SEQ ID NO: 9430 - protein, 9 aa, synthetic construct
  REGION 1..9: note = short peptide
SPMADRSMM

SEQ ID NO: 9431 - protein, 9 aa, synthetic construct
  REGION 1..9: note = short peptide
KIIDELNVK

SEQ ID NO: 9432 - protein, 9 aa, synthetic construct
  REGION 1..9: note = short peptide
SDDKSLRVW

SEQ ID NO: 9433 - protein, 10 aa, synthetic construct
  REGION 1..10: note = short peptide
KLNPYAKTMR

SEQ ID NO: 9434 - protein, 8 aa, synthetic construct
  REGION 1..8: note = short peptide
LQAQSHPI

SEQ ID NO: 9435 - protein, 9 aa, synthetic construct
  REGION 1..9: note = short peptide
SDDKSLRVW

SEQ ID NO: 9436 - protein, 9 aa, synthetic construct
  REGION 1..9: note = short peptide
HVNGTFSVY

SEQ ID NO: 9437 - protein, 10 aa, synthetic construct
  REGION 1..10: note = short peptide
YECPQCGKAF

SEQ ID NO: 9438 - protein, 9 aa, synthetic construct
  REGION 1..9: note = short peptide
SQKPVMVKR

SEQ ID NO: 9439 - protein, 9 aa, synthetic construct
  REGION 1..9: note = short peptide
SPPSFPATL

SEQ ID NO: 9440 - protein, 9 aa, synthetic construct
  REGION 1..9: note = short peptide
KYLTKKYLK

SEQ ID NO: 9441 - protein, 10 aa, synthetic construct
  REGION 1..10: note = short peptide
KPQQVRNMTL

SEQ ID NO: 9442 - protein, 10 aa, synthetic construct
  REGION 1..10: note = short peptide
VKQQEEEPQV

SEQ ID NO: 9443 - protein, 9 aa, synthetic construct
  REGION 1..9: note = short peptide
SDDRSVRIW

SEQ ID NO: 9444 - protein, 9 aa, synthetic construct
  REGION 1..9: note = short peptide
SDDRSVRLW

SEQ ID NO: 9445 - protein, 10 aa, synthetic construct
  REGION 1..10: note = short peptide
RRLAELAGSR

SEQ ID NO: 9446 - protein, 10 aa, synthetic construct
  REGION 1..10: note = short peptide
QFQLQELENF

SEQ ID NO: 9447 - protein, 9 aa, synthetic construct
  REGION 1..9: note = short peptide
KPLATKAAR

SEQ ID NO: 9448 - protein, 9 aa, synthetic construct
  REGION 1..9: note = short peptide
HYVPKIYCR

SEQ ID NO: 9449 - protein, 9 aa, synthetic construct
  REGION 1..9: note = short peptide
KGNIRVFCR

SEQ ID NO: 9450 - protein, 10 aa, synthetic construct
  REGION 1..10: note = short peptide
VKQQEEEPQV

SEQ ID NO: 9451 - protein, 10 aa, synthetic construct
  REGION 1..10: note = short peptide
QFQLQELENF

SEQ ID NO: 9452 - protein, 9 aa, synthetic construct
  REGION 1..9: note = short peptide
MDGLTAKVF

SEQ ID NO: 9453 - protein, 9 aa, synthetic construct
  REGION 1..9: note = short peptide
VGALHFRLG

SEQ ID NO: 9454 - protein, 10 aa, synthetic construct
  REGION 1..10: note = short peptide
EAVYCKFHYK

SEQ ID NO: 9455 - protein, 10 aa, synthetic construct
  REGION 1..10: note = short peptide
EAVYCKFHYK

SEQ ID NO: 9456 - protein, 9 aa, synthetic construct
  REGION 1..9: note = short peptide
YAFNGTQRF

SEQ ID NO: 9457 - protein, 9 aa, synthetic construct
  REGION 1..9: note = short peptide
SQNPRFYHK

SEQ ID NO: 9458 - protein, 8 aa, synthetic construct
  REGION 1..8: note = short peptide
YPLIIKNI

SEQ ID NO: 9459 - protein, 8 aa, synthetic construct
  REGION 1..8: note = short peptide
YPLIIKNI

SEQ ID NO: 9460 - protein, 8 aa, synthetic construct
  REGION 1..8: note = short peptide
NLIRKLPP

SEQ ID NO: 9461 - protein, 8 aa, synthetic construct
  REGION 1..8: note = short peptide
NLIRKLPP

SEQ ID NO: 9462 - protein, 9 aa, synthetic construct
  REGION 1..9: note = short peptide
APRPPFSTM

SEQ ID NO: 9463 - protein, 9 aa, synthetic construct
  REGION 1..9: note = short peptide
GTYVGLTCK

SEQ ID NO: 9464 - protein, 9 aa, synthetic construct
  REGION 1..9: note = short peptide
APRPPFSTM

SEQ ID NO: 9465 - protein, 8 aa, synthetic construct
  REGION 1..8: note = short peptide
VDLLKLSV

SEQ ID NO: 9466 - protein, 12 aa, synthetic construct
  REGION 1..12: note = short peptide
SPRFPGGPRPTL

SEQ ID NO: 9467 - protein, 9 aa, synthetic construct
  REGION 1..9: note = short peptide
TPRPPGPGL

SEQ ID NO: 9468 - protein, 9 aa, synthetic construct
  REGION 1..9: note = short peptide
RPGLRPTGL

SEQ ID NO: 9469 - protein, 9 aa, synthetic construct
  REGION 1..9: note = short peptide
KPINTTGTL

SEQ ID NO: 9470 - protein, 11 aa, synthetic construct
  REGION 1..11: note = short peptide
SPRAPVSPLKF

SEQ ID NO: 9471 - protein, 10 aa, synthetic construct
  REGION 1..10: note = short peptide
APKANGTSAL

SEQ ID NO: 9472 - protein, 15 aa, synthetic construct
  REGION 1..15: note = short peptide
RPKDYEVDATLKSLN

SEQ ID NO: 9473 - protein, 8 aa, synthetic construct
  REGION 1..8: note = short peptide
SVQRTQAP

SEQ ID NO: 9474 - protein, 8 aa, synthetic construct
  REGION 1..8: note = short peptide
LNLKKSLL

SEQ ID NO: 9475 - protein, 9 aa, synthetic construct
  REGION 1..9: note = short peptide
GPRPTLRHL

SEQ ID NO: 9476 - protein, 11 aa, synthetic construct
  REGION 1..11: note = short peptide
NSIGRGAGFER

SEQ ID NO: 9477 - protein, 11 aa, synthetic construct
  REGION 1..11: note = short peptide
APAARFNNSQF

SEQ ID NO: 9478 - protein, 13 aa, synthetic construct
  REGION 1..13: note = short peptide
ASTSTTIRSHSSS

SEQ ID NO: 9479 - protein, 15 aa, synthetic construct
  REGION 1..15: note = short peptide
VHKAVLTIDEKGTEA

SEQ ID NO: 9480 - protein, 9 aa, synthetic construct
  REGION 1..9: note = short peptide
TGLARTGRW

SEQ ID NO: 9481 - protein, 9 aa, synthetic construct
  REGION 1..9: note = short peptide
TGLARTGRW

SEQ ID NO: 9482 - protein, 9 aa, synthetic construct
  REGION 1..9: note = short peptide
KQLATKAAR

SEQ ID NO: 9483 - protein, 11 aa, synthetic construct
  REGION 1..11: note = short peptide
APSQGRPGLSL

SEQ ID NO: 9484 - protein, 9 aa, synthetic construct
  REGION 1..9: note = short peptide
AVRPATTTV

SEQ ID NO: 9485 - protein, 9 aa, synthetic construct
  REGION 1..9: note = short peptide
APSQGRPGL

SEQ ID NO: 9486 - protein, 11 aa, synthetic construct
  REGION 1..11: note = short peptide
KYVDTNLQKQR

SEQ ID NO: 9487 - protein, 9 aa, synthetic construct
  REGION 1..9: note = short peptide
HSINITRVY

SEQ ID NO: 9488 - protein, 9 aa, synthetic construct
  REGION 1..9: note = short peptide
SLAVHNITV

SEQ ID NO: 9489 - protein, 9 aa, synthetic construct
  REGION 1..9: note = short peptide
SPMADRSMM

SEQ ID NO: 9490 - protein, 10 aa, synthetic construct
  REGION 1..10: note = short peptide
GPRLVSNHSL

SEQ ID NO: 9491 - protein, 9 aa, synthetic construct
  REGION 1..9: note = short peptide
APPQSAALC

SEQ ID NO: 9492 - protein, 9 aa, synthetic construct
  REGION 1..9: note = short peptide
QPRPGFTSL

SEQ ID NO: 9493 - protein, 12 aa, synthetic construct
  REGION 1..12: note = short peptide
APRIITGPAPVL

SEQ ID NO: 9494 - protein, 8 aa, synthetic construct
  REGION 1..8: note = short peptide
KRASRNPV

SEQ ID NO: 9495 - protein, 9 aa, synthetic construct
  REGION 1..9: note = short peptide
KVINETWAW

SEQ ID NO: 9496 - protein, 9 aa, synthetic construct
  REGION 1..9: note = short peptide
APPQSAALC

SEQ ID NO: 9497 - protein, 9 aa, synthetic construct
  REGION 1..9: note = short peptide
GPRGGKSSI

SEQ ID NO: 9498 - protein, 9 aa, synthetic construct
  REGION 1..9: note = short peptide
HSKNMTISR

SEQ ID NO: 9499 - protein, 9 aa, synthetic construct
  REGION 1..9: note = short peptide
PVRPQTNAL

SEQ ID NO: 9500 - protein, 9 aa, synthetic construct
  REGION 1..9: note = short peptide
SPMADRSMM

SEQ ID NO: 9501 - protein, 8 aa, synthetic construct
  REGION 1..8: note = short peptide
CVGCSTVL

SEQ ID NO: 9502 - protein, 11 aa, synthetic construct
  REGION 1..11: note = short peptide
APAARFNNSQF

SEQ ID NO: 9503 - protein, 9 aa, synthetic construct
  REGION 1..9: note = short peptide
GVGPPRGAL

SEQ ID NO: 9504 - protein, 9 aa, synthetic construct
  REGION 1..9: note = short peptide
SVNELIYKR

SEQ ID NO: 9505 - protein, 9 aa, synthetic construct
  REGION 1..9: note = short peptide
SPMADRSMM

SEQ ID NO: 9506 - protein, 9 aa, synthetic construct
  REGION 1..9: note = short peptide
KAEAKAKAL

SEQ ID NO: 9507 - protein, 9 aa, synthetic construct
  REGION 1..9: note = short peptide
KNQAMADAL

SEQ ID NO: 9508 - protein, 8 aa, synthetic construct
  REGION 1..8: note = short peptide
ASTSTTIR

SEQ ID NO: 9509 - protein, 11 aa, synthetic construct
  REGION 1..11: note = short peptide
PNASQHITPSY

SEQ ID NO: 9510 - protein, 12 aa, synthetic construct
  REGION 1..12: note = short peptide
SPRGGTPGSGAA

SEQ ID NO: 9511 - protein, 9 aa, synthetic construct
  REGION 1..9: note = short peptide
GPRPKGPRF

SEQ ID NO: 9512 - protein, 9 aa, synthetic construct
  REGION 1..9: note = short peptide
KINLLKRSL

SEQ ID NO: 9513 - protein, 10 aa, synthetic construct
  REGION 1..10: note = short peptide
RPCSKVIVRF

SEQ ID NO: 9514 - protein, 9 aa, synthetic construct
  REGION 1..9: note = short peptide
KINLLKRSL

SEQ ID NO: 9515 - protein, 10 aa, synthetic construct
  REGION 1..10: note = short peptide
RSRSPFSTTR

SEQ ID NO: 9516 - protein, 9 aa, synthetic construct
  REGION 1..9: note = short peptide
TKVKPLLQV

SEQ ID NO: 9517 - protein, 8 aa, synthetic construct
  REGION 1..8: note = short peptide
TQNRAAYY

SEQ ID NO: 9518 - protein, 9 aa, synthetic construct
  REGION 1..9: note = short peptide
HYVPKIYCR

SEQ ID NO: 9519 - protein, 8 aa, synthetic construct
  REGION 1..8: note = short peptide
YQRFTDCY

SEQ ID NO: 9520 - protein, 9 aa, synthetic construct
  REGION 1..9: note = short peptide
KESTLHLVL

SEQ ID NO: 9521 - protein, 9 aa, synthetic construct
  REGION 1..9: note = short peptide
RYQEVCRQR

SEQ ID NO: 9522 - protein, 9 aa, synthetic construct
  REGION 1..9: note = short peptide
TSRPPTPTL

SEQ ID NO: 9523 - protein, 12 aa, synthetic construct
  REGION 1..12: note = short peptide
KMVGNVTGAQAY

SEQ ID NO: 9524 - protein, 9 aa, synthetic construct
  REGION 1..9: note = short peptide
GQRMPQQTY

SEQ ID NO: 9525 - protein, 11 aa, synthetic construct
  REGION 1..11: note = short peptide
RTNGSALCTRC

SEQ ID NO: 9526 - protein, 10 aa, synthetic construct
  REGION 1..10: note = short peptide
KGDLELEIIV

SEQ ID NO: 9527 - protein, 9 aa, synthetic construct
  REGION 1..9: note = short peptide
RRQPPPPPR

SEQ ID NO: 9528 - protein, 9 aa, synthetic construct
  REGION 1..9: note = short peptide
IGNVSTSHL

SEQ ID NO: 9529 - protein, 9 aa, synthetic construct
  REGION 1..9: note = short peptide
HPKDPDCAL

SEQ ID NO: 9530 - protein, 13 aa, synthetic construct
  REGION 1..13: note = short peptide
KLADFGLARAKSV

SEQ ID NO: 9531 - protein, 11 aa, synthetic construct
  REGION 1..11: note = short peptide
AVRPPPAPATR

SEQ ID NO: 9532 - protein, 10 aa, synthetic construct
  REGION 1..10: note = short peptide
RYYEKPCCRR

SEQ ID NO: 9533 - protein, 10 aa, synthetic construct
  REGION 1..10: note = short peptide
TQRFMNICFC

SEQ ID NO: 9534 - protein, 9 aa, synthetic construct
  REGION 1..9: note = short peptide
YRFENQTGF

SEQ ID NO: 9535 - protein, 9 aa, synthetic construct
  REGION 1..9: note = short peptide
VVIGAGACY

SEQ ID NO: 9536 - protein, 9 aa, synthetic construct
  REGION 1..9: note = short peptide
KGKPRAWAR

SEQ ID NO: 9537 - protein, 9 aa, synthetic construct
  REGION 1..9: note = short peptide
AMYPIRSAY

SEQ ID NO: 9538 - protein, 9 aa, synthetic construct
  REGION 1..9: note = short peptide
APGPRGSYL

SEQ ID NO: 9539 - protein, 9 aa, synthetic construct
  REGION 1..9: note = short peptide
YADPVNAHY

SEQ ID NO: 9540 - protein, 9 aa, synthetic construct
  REGION 1..9: note = short peptide
RGAPAPRAR

SEQ ID NO: 9541 - protein, 9 aa, synthetic construct
  REGION 1..9: note = short peptide
RNKQPFSCR

SEQ ID NO: 9542 - protein, 9 aa, synthetic construct
  REGION 1..9: note = short peptide
VPTSPKSSL

SEQ ID NO: 9543 - protein, 9 aa, synthetic construct
  REGION 1..9: note = short peptide
PSGLMNPSL

SEQ ID NO: 9544 - protein, 15 aa, synthetic construct
  REGION 1..15: note = short peptide
ADKPDMGEIASFDKA

SEQ ID NO: 9545 - protein, 9 aa, synthetic construct
  REGION 1..9: note = short peptide
SLANNVTSV

SEQ ID NO: 9546 - protein, 13 aa, synthetic construct
  REGION 1..13: note = short peptide
AQLGGPEAAKSDE

SEQ ID NO: 9547 - protein, 9 aa, synthetic construct
  REGION 1..9: note = short peptide
VFKEGQVEV

SEQ ID NO: 9548 - protein, 10 aa, synthetic construct
  REGION 1..10: note = short peptide
NEYGSINHTY

SEQ ID NO: 9549 - protein, 10 aa, synthetic construct
  REGION 1..10: note = short peptide
NEYGSINHTY

SEQ ID NO: 9550 - protein, 14 aa, synthetic construct
  REGION 1..14: note = short peptide
ADKPDMGEIASFDK

SEQ ID NO: 9551 - protein, 9 aa, synthetic construct
  REGION 1..9: note = short peptide
TVTGSSFLV

SEQ ID NO: 9552 - protein, 14 aa, synthetic construct
  REGION 1..14: note = short peptide
GYGGGRGGYGGGGP

SEQ ID NO: 9553 - protein, 14 aa, synthetic construct
  REGION 1..14: note = short peptide
SSKTASTNNIAQAR

SEQ ID NO: 9554 - protein, 10 aa, synthetic construct
  REGION 1..10: note = short peptide
SLADVDPMNI

SEQ ID NO: 9555 - protein, 8 aa, synthetic construct
  REGION 1..8: note = short peptide
FIDLLHDK

SEQ ID NO: 9556 - protein, 10 aa, synthetic construct
  REGION 1..10: note = short peptide
KLASPELERL

SEQ ID NO: 9557 - protein, 10 aa, synthetic construct
  REGION 1..10: note = short peptide
KLASPELERL

SEQ ID NO: 9558 - protein, 9 aa, synthetic construct
  REGION 1..9: note = short peptide
KLAATPKKA

SEQ ID NO: 9559 - protein, 11 aa, synthetic construct
  REGION 1..11: note = short peptide
AEDMETKIKNY

SEQ ID NO: 9560 - protein, 15 aa, synthetic construct
  REGION 1..15: note = short peptide
AQLGGPEAAKSDETA

SEQ ID NO: 9561 - protein, 10 aa, synthetic construct
  REGION 1..10: note = short peptide
VMFRTPLASV

SEQ ID NO: 9562 - protein, 11 aa, synthetic construct
  REGION 1..11: note = short peptide
TLASPSVFKST

SEQ ID NO: 9563 - protein, 15 aa, synthetic construct
  REGION 1..15: note = short peptide
AKSKNHTTHNQSRKW

SEQ ID NO: 9564 - protein, 8 aa, synthetic construct
  REGION 1..8: note = short peptide
MDGVPFTL

SEQ ID NO: 9565 - protein, 9 aa, synthetic construct
  REGION 1..9: note = short peptide
TGLVTVLGP

SEQ ID NO: 9566 - protein, 9 aa, synthetic construct
  REGION 1..9: note = short peptide
VSDMNGLGF

SEQ ID NO: 9567 - protein, 14 aa, synthetic construct
  REGION 1..14: note = short peptide
TTTTTFKGVDPNSR

SEQ ID NO: 9568 - protein, 11 aa, synthetic construct
  REGION 1..11: note = short peptide
ATHGQTCARPM

SEQ ID NO: 9569 - protein, 12 aa, synthetic construct
  REGION 1..12: note = short peptide
KRTKKVGIVGKY

SEQ ID NO: 9570 - protein, 9 aa, synthetic construct
  REGION 1..9: note = short peptide
NIICGITSV

SEQ ID NO: 9571 - protein, 13 aa, synthetic construct
  REGION 1..13: note = short peptide
SLVIPEKFQHILR

SEQ ID NO: 9572 - protein, 8 aa, synthetic construct
  REGION 1..8: note = short peptide
MDGVPFTL

SEQ ID NO: 9573 - protein, 12 aa, synthetic construct
  REGION 1..12: note = short peptide
AGVLKKTTGLVG

SEQ ID NO: 9574 - protein, 14 aa, synthetic construct
  REGION 1..14: note = short peptide
AGKQAVSASGKWLD

SEQ ID NO: 9575 - protein, 14 aa, synthetic construct
  REGION 1..14: note = short peptide
RTPKIQVYSRHPAE

SEQ ID NO: 9576 - protein, 12 aa, synthetic construct
  REGION 1..12: note = short peptide
AEDMETKIKNYK

SEQ ID NO: 9577 - protein, 9 aa, synthetic construct
  REGION 1..9: note = short peptide
ILAQEIVKA

SEQ ID NO: 9578 - protein, 8 aa, synthetic construct
  REGION 1..8: note = short peptide
ASATRLIQ

SEQ ID NO: 9579 - protein, 9 aa, synthetic construct
  REGION 1..9: note = short peptide
KMPCQLHQV

SEQ ID NO: 9580 - protein, 15 aa, synthetic construct
  REGION 1..15: note = short peptide
HAPGKGLSQSALPYR

SEQ ID NO: 9581 - protein, 11 aa, synthetic construct
  REGION 1..11: note = short peptide
LSNLDKGTLKL

SEQ ID NO: 9582 - protein, 11 aa, synthetic construct
  REGION 1..11: note = short peptide
LSNLDKGTLKL

SEQ ID NO: 9583 - protein, 12 aa, synthetic construct
  REGION 1..12: note = short peptide
AEDMETKIKNYK

SEQ ID NO: 9584 - protein, 10 aa, synthetic construct
  REGION 1..10: note = short peptide
MMGHRPVLVL

SEQ ID NO: 9585 - protein, 15 aa, synthetic construct
  REGION 1..15: note = short peptide
AGSGVRQATSTASTF

SEQ ID NO: 9586 - protein, 10 aa, synthetic construct
  REGION 1..10: note = short peptide
AGVLKKTTGL

SEQ ID NO: 9587 - protein, 14 aa, synthetic construct
  REGION 1..14: note = short peptide
SKRADGAAPAGEGE

SEQ ID NO: 9588 - protein, 11 aa, synthetic construct
  REGION 1..11: note = short peptide
ATHGQTCARPM

SEQ ID NO: 9589 - protein, 13 aa, synthetic construct
  REGION 1..13: note = short peptide
TKGGDAPAAGEDA

SEQ ID NO: 9590 - protein, 11 aa, synthetic construct
  REGION 1..11: note = short peptide
ATHGQTCARPM

SEQ ID NO: 9591 - protein, 15 aa, synthetic construct
  REGION 1..15: note = short peptide
FGGGRGGGFGGNDNF

SEQ ID NO: 9592 - protein, 10 aa, synthetic construct
  REGION 1..10: note = short peptide
VTAYPNRPMV

SEQ ID NO: 9593 - protein, 9 aa, synthetic construct
  REGION 1..9: note = short peptide
KKNSVPVTV

SEQ ID NO: 9594 - protein, 9 aa, synthetic construct
  REGION 1..9: note = short peptide
NQFPGFKEV

SEQ ID NO: 9595 - protein, 11 aa, synthetic construct
  REGION 1..11: note = short peptide
SESGHSQPGLY

SEQ ID NO: 9596 - protein, 8 aa, synthetic construct
  REGION 1..8: note = short peptide
GDTQPTTF

SEQ ID NO: 9597 - protein, 8 aa, synthetic construct
  REGION 1..8: note = short peptide
GDTQPTTF

SEQ ID NO: 9598 - protein, 9 aa, synthetic construct
  REGION 1..9: note = short peptide
TTPCPGTIT

SEQ ID NO: 9599 - protein, 14 aa, synthetic construct
  REGION 1..14: note = short peptide
SDKPDMAEIEKFDK

SEQ ID NO: 9600 - protein, 11 aa, synthetic construct
  REGION 1..11: note = short peptide
RQDSTPGKVFL

SEQ ID NO: 9601 - protein, 9 aa, synthetic construct
  REGION 1..9: note = short peptide
VMAPRTVLL

SEQ ID NO: 9602 - protein, 15 aa, synthetic construct
  REGION 1..15: note = short peptide
RTPKIQVYSRHPAEN

SEQ ID NO: 9603 - protein, 9 aa, synthetic construct
  REGION 1..9: note = short peptide
IEHGIVTNW

SEQ ID NO: 9604 - protein, 9 aa, synthetic construct
  REGION 1..9: note = short peptide
SLNDSATEV

SEQ ID NO: 9605 - protein, 11 aa, synthetic construct
  REGION 1..11: note = short peptide
ALGGEKALGGL

SEQ ID NO: 9606 - protein, 9 aa, synthetic construct
  REGION 1..9: note = short peptide
TALPPPLAP

SEQ ID NO: 9607 - protein, 10 aa, synthetic construct
  REGION 1..10: note = short peptide
ALANLTGTVV

SEQ ID NO: 9608 - protein, 14 aa, synthetic construct
  REGION 1..14: note = short peptide
TPKIQVYSRHPAEN

SEQ ID NO: 9609 - protein, 14 aa, synthetic construct
  REGION 1..14: note = short peptide
SDKPDMAEIEKFDK

SEQ ID NO: 9610 - protein, 9 aa, synthetic construct
  REGION 1..9: note = short peptide
VEGTCTGKY

SEQ ID NO: 9611 - protein, 8 aa, synthetic construct
  REGION 1..8: note = short peptide
AQRTGLED

SEQ ID NO: 9612 - protein, 8 aa, synthetic construct
  REGION 1..8: note = short peptide
SGLGLGCY

SEQ ID NO: 9613 - protein, 8 aa, synthetic construct
  REGION 1..8: note = short peptide
GGWGASPY

SEQ ID NO: 9614 - protein, 8 aa, synthetic construct
  REGION 1..8: note = short peptide
VGIGAWNY

SEQ ID NO: 9615 - protein, 10 aa, synthetic construct
  REGION 1..10: note = short peptide
ATCHFALGEY

SEQ ID NO: 9616 - protein, 9 aa, synthetic construct
  REGION 1..9: note = short peptide
TMGINGSAY

SEQ ID NO: 9617 - protein, 13 aa, synthetic construct
  REGION 1..13: note = short peptide
AASAARGAAALRR

SEQ ID NO: 9618 - protein, 12 aa, synthetic construct
  REGION 1..12: note = short peptide
AQRTGLEDPERY

SEQ ID NO: 9619 - protein, 8 aa, synthetic construct
  REGION 1..8: note = short peptide
VCDKPLLY

SEQ ID NO: 9620 - protein, 8 aa, synthetic construct
  REGION 1..8: note = short peptide
YGGGRGGY

SEQ ID NO: 9621 - protein, 9 aa, synthetic construct
  REGION 1..9: note = short peptide
RDAPPPPPP

SEQ ID NO: 9622 - protein, 12 aa, synthetic construct
  REGION 1..12: note = short peptide
FTEYPCGSGNVY

SEQ ID NO: 9623 - protein, 12 aa, synthetic construct
  REGION 1..12: note = short peptide
FTEYPCGSGNVY

SEQ ID NO: 9624 - protein, 11 aa, synthetic construct
  REGION 1..11: note = short peptide
FLDASGAKLDY

SEQ ID NO: 9625 - protein, 9 aa, synthetic construct
  REGION 1..9: note = short peptide
YSDKYGLGY

SEQ ID NO: 9626 - protein, 8 aa, synthetic construct
  REGION 1..8: note = short peptide
YTDKIDRY

SEQ ID NO: 9627 - protein, 14 aa, synthetic construct
  REGION 1..14: note = short peptide
AGKQAVSASGKWLD

SEQ ID NO: 9628 - protein, 10 aa, synthetic construct
  REGION 1..10: note = short peptide
VTDKSMVDKY

SEQ ID NO: 9629 - protein, 9 aa, synthetic construct
  REGION 1..9: note = short peptide
LSDPVGTCY

SEQ ID NO: 9630 - protein, 9 aa, synthetic construct
  REGION 1..9: note = short peptide
PVTSPPPPP

SEQ ID NO: 9631 - protein, 8 aa, synthetic construct
  REGION 1..8: note = short peptide
VASPEPPQ

SEQ ID NO: 9632 - protein, 9 aa, synthetic construct
  REGION 1..9: note = short peptide
LTMPETCRY

SEQ ID NO: 9633 - protein, 8 aa, synthetic construct
  REGION 1..8: note = short peptide
TGEADVEF

SEQ ID NO: 9634 - protein, 10 aa, synthetic construct
  REGION 1..10: note = short peptide
TTDCLQILAY

SEQ ID NO: 9635 - protein, 8 aa, synthetic construct
  REGION 1..8: note = short peptide
QDVQLLVM

SEQ ID NO: 9636 - protein, 11 aa, synthetic construct
  REGION 1..11: note = short peptide
GCTANDANTKY

SEQ ID NO: 9637 - protein, 8 aa, synthetic construct
  REGION 1..8: note = short peptide
EESGICKV

SEQ ID NO: 9638 - protein, 10 aa, synthetic construct
  REGION 1..10: note = short peptide
TTDCLQILAY

SEQ ID NO: 9639 - protein, 11 aa, synthetic construct
  REGION 1..11: note = short peptide
LTAALGTGFLY

SEQ ID NO: 9640 - protein, 10 aa, synthetic construct
  REGION 1..10: note = short peptide
NEALYDICSR

SEQ ID NO: 9641 - protein, 10 aa, synthetic construct
  REGION 1..10: note = short peptide
YSEGYPGQRY

SEQ ID NO: 9642 - protein, 11 aa, synthetic construct
  REGION 1..11: note = short peptide
TSDNGKDGLAY

SEQ ID NO: 9643 - protein, 15 aa, synthetic construct
  REGION 1..15: note = short peptide
AGKVTKSAQKAQKAK

SEQ ID NO: 9644 - protein, 8 aa, synthetic construct
  REGION 1..8: note = short peptide
EDAAFNKI

SEQ ID NO: 9645 - protein, 8 aa, synthetic construct
  REGION 1..8: note = short peptide
KGMFYNSY

SEQ ID NO: 9646 - protein, 8 aa, synthetic construct
  REGION 1..8: note = short peptide
TDADKLKK

SEQ ID NO: 9647 - protein, 9 aa, synthetic construct
  REGION 1..9: note = short peptide
YLDDPDLKY

SEQ ID NO: 9648 - protein, 10 aa, synthetic construct
  REGION 1..10: note = short peptide
ADTGSGKTAA

SEQ ID NO: 9649 - protein, 10 aa, synthetic construct
  REGION 1..10: note = short peptide
KSDSGKPYYY

SEQ ID NO: 9650 - protein, 8 aa, synthetic construct
  REGION 1..8: note = short peptide
REAKKQGP

SEQ ID NO: 9651 - protein, 8 aa, synthetic construct
  REGION 1..8: note = short peptide
GSGIISNY

SEQ ID NO: 9652 - protein, 9 aa, synthetic construct
  REGION 1..9: note = short peptide
DSDSCHFNY

SEQ ID NO: 9653 - protein, 10 aa, synthetic construct
  REGION 1..10: note = short peptide
TTDCLQLLAY

SEQ ID NO: 9654 - protein, 9 aa, synthetic construct
  REGION 1..9: note = short peptide
YLDDPDLKY

SEQ ID NO: 9655 - protein, 10 aa, synthetic construct
  REGION 1..10: note = short peptide
SLDVGGPLRY

SEQ ID NO: 9656 - protein, 10 aa, synthetic construct
  REGION 1..10: note = short peptide
MMDPNSTQRY

SEQ ID NO: 9657 - protein, 11 aa, synthetic construct
  REGION 1..11: note = short peptide
FTENDKEYQEY

SEQ ID NO: 9658 - protein, 10 aa, synthetic construct
  REGION 1..10: note = short peptide
DVGANGQLQY

SEQ ID NO: 9659 - protein, 9 aa, synthetic construct
  REGION 1..9: note = short peptide
SECGKTFTV

SEQ ID NO: 9660 - protein, 8 aa, synthetic construct
  REGION 1..8: note = short peptide
QNFKVVVV

SEQ ID NO: 9661 - protein, 9 aa, synthetic construct
  REGION 1..9: note = short peptide
REKECGVTA

SEQ ID NO: 9662 - protein, 10 aa, synthetic construct
  REGION 1..10: note = short peptide
TTDCLQLLAY

SEQ ID NO: 9663 - protein, 10 aa, synthetic construct
  REGION 1..10: note = short peptide
DVGANGQLQY

SEQ ID NO: 9664 - protein, 8 aa, synthetic construct
  REGION 1..8: note = short peptide
QNFKVVVV

SEQ ID NO: 9665 - protein, 10 aa, synthetic construct
  REGION 1..10: note = short peptide
KPNETVLTAF

SEQ ID NO: 9666 - protein, 9 aa, synthetic construct
  REGION 1..9: note = short peptide
SEFTGVWKY

SEQ ID NO: 9667 - protein, 9 aa, synthetic construct
  REGION 1..9: note = short peptide
KEAPPMEKP

SEQ ID NO: 9668 - protein, 10 aa, synthetic construct
  REGION 1..10: note = short peptide
VTDGPGNYKY

SEQ ID NO: 9669 - protein, 9 aa, synthetic construct
  REGION 1..9: note = short peptide
LLLEPYNKY

SEQ ID NO: 9670 - protein, 8 aa, synthetic construct
  REGION 1..8: note = short peptide
NTDSPLRY

SEQ ID NO: 9671 - protein, 9 aa, synthetic construct
  REGION 1..9: note = short peptide
SEKCSLQAA

SEQ ID NO: 9672 - protein, 10 aa, synthetic construct
  REGION 1..10: note = short peptide
CVDDPKFYSY

SEQ ID NO: 9673 - protein, 10 aa, synthetic construct
  REGION 1..10: note = short peptide
KPNETVLTAF

SEQ ID NO: 9674 - protein, 9 aa, synthetic construct
  REGION 1..9: note = short peptide
SEFTGVWKY

SEQ ID NO: 9675 - protein, 9 aa, synthetic construct
  REGION 1..9: note = short peptide
NVEKKIDKY

SEQ ID NO: 9676 - protein, 10 aa, synthetic construct
  REGION 1..10: note = short peptide
YVDCGRNTTY

SEQ ID NO: 9677 - protein, 10 aa, synthetic construct
  REGION 1..10: note = short peptide
YVDCGRNTTY

SEQ ID NO: 9678 - protein, 9 aa, synthetic construct
  REGION 1..9: note = short peptide
YSEDECKQY

SEQ ID NO: 9679 - protein, 9 aa, synthetic construct
  REGION 1..9: note = short peptide
NSEEHSAKY

SEQ ID NO: 9680 - protein, 9 aa, synthetic construct
  REGION 1..9: note = short peptide
RSDDSEHKY

SEQ ID NO: 9681 - protein, 11 aa, synthetic construct
  REGION 1..11: note = short peptide
LTEVNKTGTQY

SEQ ID NO: 9682 - protein, 10 aa, synthetic construct
  REGION 1..10: note = short peptide
HSDKSRPGQY

SEQ ID NO: 9683 - protein, 8 aa, synthetic construct
  REGION 1..8: note = short peptide
HTNYSLKY

SEQ ID NO: 9684 - protein, 11 aa, synthetic construct
  REGION 1..11: note = short peptide
ADGGSERADGR

SEQ ID NO: 9685 - protein, 9 aa, synthetic construct
  REGION 1..9: note = short peptide
VTNYSYSYY

SEQ ID NO: 9686 - protein, 11 aa, synthetic construct
  REGION 1..11: note = short peptide
YTDHQNSSSYY

SEQ ID NO: 9687 - protein, 10 aa, synthetic construct
  REGION 1..10: note = short peptide
YTDHQNSSSY

SEQ ID NO: 9688 - protein, 9 aa, synthetic construct
  REGION 1..9: note = short peptide
FLDHKTLYY

SEQ ID NO: 9689 - protein, 9 aa, synthetic construct
  REGION 1..9: note = short peptide
ILNNPNIPP

SEQ ID NO: 9690 - protein, 9 aa, synthetic construct
  REGION 1..9: note = short peptide
ILNNPNIPP

SEQ ID NO: 9691 - protein, 10 aa, synthetic construct
  REGION 1..10: note = short peptide
HTNTSHVMQY

SEQ ID NO: 9692 - protein, 9 aa, synthetic construct
  REGION 1..9: note = short peptide
LSELAALCY

SEQ ID NO: 9693 - protein, 10 aa, synthetic construct
  REGION 1..10: note = short peptide
HTNTSHVMQY

SEQ ID NO: 9694 - protein, 10 aa, synthetic construct
  REGION 1..10: note = short peptide
LTDDGNKWLY

SEQ ID NO: 9695 - protein, 10 aa, synthetic construct
  REGION 1..10: note = short peptide
LTDDGNKWLY

SEQ ID NO: 9696 - protein, 13 aa, synthetic construct
  REGION 1..13: note = short peptide
ETDRAGYANGSGY

SEQ ID NO: 9697 - protein, 10 aa, synthetic construct
  REGION 1..10: note = short peptide
LLDQGQLNKY

SEQ ID NO: 9698 - protein, 10 aa, synthetic construct
  REGION 1..10: note = short peptide
STDPSVLGKY

SEQ ID NO: 9699 - protein, 9 aa, synthetic construct
  REGION 1..9: note = short peptide
NTEEEGLKY

SEQ ID NO: 9700 - protein, 10 aa, synthetic construct
  REGION 1..10: note = short peptide
KSDSGKPYYY

SEQ ID NO: 9701 - protein, 9 aa, synthetic construct
  REGION 1..9: note = short peptide
IADMGHLKY

SEQ ID NO: 9702 - protein, 8 aa, synthetic construct
  REGION 1..8: note = short peptide
LTDDGNKW

SEQ ID NO: 9703 - protein, 9 aa, synthetic construct
  REGION 1..9: note = short peptide
NTDRNIDKY

SEQ ID NO: 9704 - protein, 9 aa, synthetic construct
  REGION 1..9: note = short peptide
YTNRTGAVY

SEQ ID NO: 9705 - protein, 9 aa, synthetic construct
  REGION 1..9: note = short peptide
VTEIDQDKY

SEQ ID NO: 9706 - protein, 10 aa, synthetic construct
  REGION 1..10: note = short peptide
YRNDQRNRPY

SEQ ID NO: 9707 - protein, 9 aa, synthetic construct
  REGION 1..9: note = short peptide
LSNISHLNY

SEQ ID NO: 9708 - protein, 9 aa, synthetic construct
  REGION 1..9: note = short peptide
GSDCTTIHY

SEQ ID NO: 9709 - protein, 10 aa, synthetic construct
  REGION 1..10: note = short peptide
ATEDPWKTNY

SEQ ID NO: 9710 - protein, 9 aa, synthetic construct
  REGION 1..9: note = short peptide
TNNKIEKIY

SEQ ID NO: 9711 - protein, 9 aa, synthetic construct
  REGION 1..9: note = short peptide
GSDCTTIHY

SEQ ID NO: 9712 - protein, 10 aa, synthetic construct
  REGION 1..10: note = short peptide
ATEDPWKTNY

SEQ ID NO: 9713 - protein, 9 aa, synthetic construct
  REGION 1..9: note = short peptide
TNNKIEKIY

SEQ ID NO: 9714 - protein, 10 aa, synthetic construct
  REGION 1..10: note = short peptide
YSYPTGNHTY

SEQ ID NO: 9715 - protein, 11 aa, synthetic construct
  REGION 1..11: note = short peptide
GPLNLTSGPEP

SEQ ID NO: 9716 - protein, 8 aa, synthetic construct
  REGION 1..8: note = short peptide
VTDFPSCY

SEQ ID NO: 9717 - protein, 11 aa, synthetic construct
  REGION 1..11: note = short peptide
GPLNLTSGPEP

SEQ ID NO: 9718 - protein, 11 aa, synthetic construct
  REGION 1..11: note = short peptide
ASDPHGDNLTY

SEQ ID NO: 9719 - protein, 9 aa, synthetic construct
  REGION 1..9: note = short peptide
HTDILKEKY

SEQ ID NO: 9720 - protein, 9 aa, synthetic construct
  REGION 1..9: note = short peptide
IVDNSPASY

SEQ ID NO: 9721 - protein, 10 aa, synthetic construct
  REGION 1..10: note = short peptide
HSNHGDPLSY

SEQ ID NO: 9722 - protein, 9 aa, synthetic construct
  REGION 1..9: note = short peptide
TTEVHPELY

SEQ ID NO: 9723 - protein, 10 aa, synthetic construct
  REGION 1..10: note = short peptide
ASDPAVPCEY

SEQ ID NO: 9724 - protein, 8 aa, synthetic construct
  REGION 1..8: note = short peptide
AFGNIGSY

SEQ ID NO: 9725 - protein, 11 aa, synthetic construct
  REGION 1..11: note = short peptide
HSEKTNRTLSY

SEQ ID NO: 9726 - protein, 11 aa, synthetic construct
  REGION 1..11: note = short peptide
YLEHVGHNHTY

SEQ ID NO: 9727 - protein, 9 aa, synthetic construct
  REGION 1..9: note = short peptide
GSDFCHTSY

SEQ ID NO: 9728 - protein, 11 aa, synthetic construct
  REGION 1..11: note = short peptide
RNSRNHTVNSG

SEQ ID NO: 9729 - protein, 11 aa, synthetic construct
  REGION 1..11: note = short peptide
RNSRNHTVNSG

SEQ ID NO: 9730 - protein, 11 aa, synthetic construct
  REGION 1..11: note = short peptide
RNSRNHTVNSG

SEQ ID NO: 9731 - protein, 9 aa, synthetic construct
  REGION 1..9: note = short peptide
YSDVHNCSY

SEQ ID NO: 9732 - protein, 9 aa, synthetic construct
  REGION 1..9: note = short peptide
YSDVHNCSY

SEQ ID NO: 9733 - protein, 9 aa, synthetic construct
  REGION 1..9: note = short peptide
MSEDKPQDY

SEQ ID NO: 9734 - protein, 9 aa, synthetic construct
  REGION 1..9: note = short peptide
KMTEVVLKA

SEQ ID NO: 9735 - protein, 9 aa, synthetic construct
  REGION 1..9: note = short peptide
ATVLQTVPG

SEQ ID NO: 9736 - protein, 9 aa, synthetic construct
  REGION 1..9: note = short peptide
ASLGNWTYK

SEQ ID NO: 9737 - protein, 10 aa, synthetic construct
  REGION 1..10: note = short peptide
KTATAVAHCK

SEQ ID NO: 9738 - protein, 10 aa, synthetic construct
  REGION 1..10: note = short peptide
KTATAVAHCK

SEQ ID NO: 9739 - protein, 13 aa, synthetic construct
  REGION 1..13: note = short peptide
MDGIVPDIAVGTK

SEQ ID NO: 9740 - protein, 11 aa, synthetic construct
  REGION 1..11: note = short peptide
FLLARKATIQK

SEQ ID NO: 9741 - protein, 11 aa, synthetic construct
  REGION 1..11: note = short peptide
RVQEAVESMVK

SEQ ID NO: 9742 - protein, 13 aa, synthetic construct
  REGION 1..13: note = short peptide
MNHIVQTFSPVNS

SEQ ID NO: 9743 - protein, 10 aa, synthetic construct
  REGION 1..10: note = short peptide
SIGSPVKVGK

SEQ ID NO: 9744 - protein, 9 aa, synthetic construct
  REGION 1..9: note = short peptide
KMNCYALIR

SEQ ID NO: 9745 - protein, 10 aa, synthetic construct
  REGION 1..10: note = short peptide
KLCNIFSTKF

SEQ ID NO: 9746 - protein, 10 aa, synthetic construct
  REGION 1..10: note = short peptide
RRSSALTNHK

SEQ ID NO: 9747 - protein, 10 aa, synthetic construct
  REGION 1..10: note = short peptide
KSAPATGGVK

SEQ ID NO: 9748 - protein, 8 aa, synthetic construct
  REGION 1..8: note = short peptide
KVPAAPPK

SEQ ID NO: 9749 - protein, 8 aa, synthetic construct
  REGION 1..8: note = short peptide
KIGFHLSH

SEQ ID NO: 9750 - protein, 9 aa, synthetic construct
  REGION 1..9: note = short peptide
KTTKKILCK

SEQ ID NO: 9751 - protein, 10 aa, synthetic construct
  REGION 1..10: note = short peptide
IVYCGQVFEK

SEQ ID NO: 9752 - protein, 10 aa, synthetic construct
  REGION 1..10: note = short peptide
KVCNPIITKL

SEQ ID NO: 9753 - protein, 8 aa, synthetic construct
  REGION 1..8: note = short peptide
LLSLVTKK

SEQ ID NO: 9754 - protein, 11 aa, synthetic construct
  REGION 1..11: note = short peptide
RVLGPCSDILK

SEQ ID NO: 9755 - protein, 9 aa, synthetic construct
  REGION 1..9: note = short peptide
KKYEAFLNK

SEQ ID NO: 9756 - protein, 9 aa, synthetic construct
  REGION 1..9: note = short peptide
KLIDKIHTK

SEQ ID NO: 9757 - protein, 10 aa, synthetic construct
  REGION 1..10: note = short peptide
KTPTSPLKMK

SEQ ID NO: 9758 - protein, 9 aa, synthetic construct
  REGION 1..9: note = short peptide
GTCGKAFSR

SEQ ID NO: 9759 - protein, 8 aa, synthetic construct
  REGION 1..8: note = short peptide
HVHREIHK

SEQ ID NO: 9760 - protein, 10 aa, synthetic construct
  REGION 1..10: note = short peptide
KTPTSPLKMK

SEQ ID NO: 9761 - protein, 10 aa, synthetic construct
  REGION 1..10: note = short peptide
KTPTSPLKMK

SEQ ID NO: 9762 - protein, 8 aa, synthetic construct
  REGION 1..8: note = short peptide
HIVLELFR

SEQ ID NO: 9763 - protein, 10 aa, synthetic construct
  REGION 1..10: note = short peptide
KILQMVNVAK

SEQ ID NO: 9764 - protein, 10 aa, synthetic construct
  REGION 1..10: note = short peptide
GTYDGRCIFY

SEQ ID NO: 9765 - protein, 10 aa, synthetic construct
  REGION 1..10: note = short peptide
LSYLSVRGGF

SEQ ID NO: 9766 - protein, 9 aa, synthetic construct
  REGION 1..9: note = short peptide
ILNSHCFAR

SEQ ID NO: 9767 - protein, 10 aa, synthetic construct
  REGION 1..10: note = short peptide
KTPTSPLKMK

SEQ ID NO: 9768 - protein, 9 aa, synthetic construct
  REGION 1..9: note = short peptide
ILNSHCFAR

SEQ ID NO: 9769 - protein, 8 aa, synthetic construct
  REGION 1..8: note = short peptide
IVLPPKPK

SEQ ID NO: 9770 - protein, 10 aa, synthetic construct
  REGION 1..10: note = short peptide
KTATAVAHCK

SEQ ID NO: 9771 - protein, 10 aa, synthetic construct
  REGION 1..10: note = short peptide
RTASPPPPPK

SEQ ID NO: 9772 - protein, 8 aa, synthetic construct
  REGION 1..8: note = short peptide
KKAKGAAK

SEQ ID NO: 9773 - protein, 10 aa, synthetic construct
  REGION 1..10: note = short peptide
KTATAVAHCK

SEQ ID NO: 9774 - protein, 9 aa, synthetic construct
  REGION 1..9: note = short peptide
QPQPPPPKP

SEQ ID NO: 9775 - protein, 15 aa, synthetic construct
  REGION 1..15: note = short peptide
DDDIAALVVDNGSGM

SEQ ID NO: 9776 - protein, 12 aa, synthetic construct
  REGION 1..12: note = short peptide
VPPVQVSPLIKL

SEQ ID NO: 9777 - protein, 11 aa, synthetic construct
  REGION 1..11: note = short peptide
GSFKYAWVLDK

SEQ ID NO: 9778 - protein, 10 aa, synthetic construct
  REGION 1..10: note = short peptide
RSGPPHRGDE

SEQ ID NO: 9779 - protein, 10 aa, synthetic construct
  REGION 1..10: note = short peptide
AVQKAIPMYK

SEQ ID NO: 9780 - protein, 11 aa, synthetic construct
  REGION 1..11: note = short peptide
SESSSKSSQPL

SEQ ID NO: 9781 - protein, 12 aa, synthetic construct
  REGION 1..12: note = short peptide
EEEIAALVIDNG

SEQ ID NO: 9782 - protein, 14 aa, synthetic construct
  REGION 1..14: note = short peptide
AAAAASRGVGAKLG

SEQ ID NO: 9783 - protein, 11 aa, synthetic construct
  REGION 1..11: note = short peptide
KTYGCVPVANK

SEQ ID NO: 9784 - protein, 10 aa, synthetic construct
  REGION 1..10: note = short peptide
KLCIGNITNK

SEQ ID NO: 9785 - protein, 12 aa, synthetic construct
  REGION 1..12: note = short peptide
GVQGPPGPAGPR

SEQ ID NO: 9786 - protein, 13 aa, synthetic construct
  REGION 1..13: note = short peptide
AGVLKKTTGLVGL

SEQ ID NO: 9787 - protein, 13 aa, synthetic construct
  REGION 1..13: note = short peptide
GHQQLYWSHPRKF

SEQ ID NO: 9788 - protein, 14 aa, synthetic construct
  REGION 1..14: note = short peptide
ADIQTERAYQKQPT

SEQ ID NO: 9789 - protein, 14 aa, synthetic construct
  REGION 1..14: note = short peptide
DDDIAALVVDNGSG

SEQ ID NO: 9790 - protein, 10 aa, synthetic construct
  REGION 1..10: note = short peptide
IGLPAGPPKP

SEQ ID NO: 9791 - protein, 11 aa, synthetic construct
  REGION 1..11: note = short peptide
SPALVGSNITF

SEQ ID NO: 9792 - protein, 10 aa, synthetic construct
  REGION 1..10: note = short peptide
KVKVGVNGFG

SEQ ID NO: 9793 - protein, 9 aa, synthetic construct
  REGION 1..9: note = short peptide
SVWDCVIFH

SEQ ID NO: 9794 - protein, 10 aa, synthetic construct
  REGION 1..10: note = short peptide
AVLGARGVGK

SEQ ID NO: 9795 - protein, 9 aa, synthetic construct
  REGION 1..9: note = short peptide
NTLEGNVTF

SEQ ID NO: 9796 - protein, 14 aa, synthetic construct
  REGION 1..14: note = short peptide
SGSSSVAAMKKVVQ

SEQ ID NO: 9797 - protein, 12 aa, synthetic construct
  REGION 1..12: note = short peptide
SLVIPEKFQHIL

SEQ ID NO: 9798 - protein, 9 aa, synthetic construct
  REGION 1..9: note = short peptide
SILSLVTKI

SEQ ID NO: 9799 - protein, 8 aa, synthetic construct
  REGION 1..8: note = short peptide
KVPKLLIY

SEQ ID NO: 9800 - protein, 12 aa, synthetic construct
  REGION 1..12: note = short peptide
DDDIAALVVDNG

SEQ ID NO: 9801 - protein, 10 aa, synthetic construct
  REGION 1..10: note = short peptide
KEAKDLLVKL

SEQ ID NO: 9802 - protein, 12 aa, synthetic construct
  REGION 1..12: note = short peptide
TVPPAFINMAAT

SEQ ID NO: 9803 - protein, 10 aa, synthetic construct
  REGION 1..10: note = short peptide
SAHLQWMVVR

SEQ ID NO: 9804 - protein, 15 aa, synthetic construct
  REGION 1..15: note = short peptide
VETRPAGDGTFQKWA

SEQ ID NO: 9805 - protein, 9 aa, synthetic construct
  REGION 1..9: note = short peptide
NYNQTVSRM

SEQ ID NO: 9806 - protein, 11 aa, synthetic construct
  REGION 1..11: note = short peptide
AEVEQKKKRTF

SEQ ID NO: 9807 - protein, 9 aa, synthetic construct
  REGION 1..9: note = short peptide
LFPPLAAEV

SEQ ID NO: 9808 - protein, 8 aa, synthetic construct
  REGION 1..8: note = short peptide
SIGRGAGF

SEQ ID NO: 9809 - protein, 9 aa, synthetic construct
  REGION 1..9: note = short peptide
VTDEPPPGL

SEQ ID NO: 9810 - protein, 9 aa, synthetic construct
  REGION 1..9: note = short peptide
VLGAPVKGK

SEQ ID NO: 9811 - protein, 9 aa, synthetic construct
  REGION 1..9: note = short peptide
PYPPPLSPA

SEQ ID NO: 9812 - protein, 9 aa, synthetic construct
  REGION 1..9: note = short peptide
GTWWKAPCY

SEQ ID NO: 9813 - protein, 9 aa, synthetic construct
  REGION 1..9: note = short peptide
MPSPVSPKL

SEQ ID NO: 9814 - protein, 9 aa, synthetic construct
  REGION 1..9: note = short peptide
AFANLRKVL

SEQ ID NO: 9815 - protein, 11 aa, synthetic construct
  REGION 1..11: note = short peptide
HIVGSKALLSK

SEQ ID NO: 9816 - protein, 10 aa, synthetic construct
  REGION 1..10: note = short peptide
MPVDPNEPTY

SEQ ID NO: 9817 - protein, 10 aa, synthetic construct
  REGION 1..10: note = short peptide
TSHLEIRFTK

SEQ ID NO: 9818 - protein, 14 aa, synthetic construct
  REGION 1..14: note = short peptide
TDRYTIHSQLEHLQ

SEQ ID NO: 9819 - protein, 15 aa, synthetic construct
  REGION 1..15: note = short peptide
ALHVPKAPGFAQMLK

SEQ ID NO: 9820 - protein, 13 aa, synthetic construct
  REGION 1..13: note = short peptide
SNSAQGSDVSLTA

SEQ ID NO: 9821 - protein, 9 aa, synthetic construct
  REGION 1..9: note = short peptide
VTNQTKTNV

SEQ ID NO: 9822 - protein, 9 aa, synthetic construct
  REGION 1..9: note = short peptide
NYNQTVSRM

SEQ ID NO: 9823 - protein, 11 aa, synthetic construct
  REGION 1..11: note = short peptide
SMLRLQKRLAS

SEQ ID NO: 9824 - protein, 13 aa, synthetic construct
  REGION 1..13: note = short peptide
KLFTEVEGTCTGK

SEQ ID NO: 9825 - protein, 12 aa, synthetic construct
  REGION 1..12: note = short peptide
KEALKISVAPGL

SEQ ID NO: 9826 - protein, 11 aa, synthetic construct
  REGION 1..11: note = short peptide
YIAALGGAGGK

SEQ ID NO: 9827 - protein, 10 aa, synthetic construct
  REGION 1..10: note = short peptide
IGGAVALVTI

SEQ ID NO: 9828 - protein, 12 aa, synthetic construct
  REGION 1..12: note = short peptide
MEGSPTGTTVMR

SEQ ID NO: 9829 - protein, 9 aa, synthetic construct
  REGION 1..9: note = short peptide
HYNGTDVSF

SEQ ID NO: 9830 - protein, 9 aa, synthetic construct
  REGION 1..9: note = short peptide
KLHQSVTKA

SEQ ID NO: 9831 - protein, 9 aa, synthetic construct
  REGION 1..9: note = short peptide
LLCDLINKL

SEQ ID NO: 9832 - protein, 15 aa, synthetic construct
  REGION 1..15: note = short peptide
AGRKLALKTIDWVAF

SEQ ID NO: 9833 - protein, 15 aa, synthetic construct
  REGION 1..15: note = short peptide
ASSNSAQGSDVSLTA

SEQ ID NO: 9834 - protein, 9 aa, synthetic construct
  REGION 1..9: note = short peptide
RLGCFNLTV

SEQ ID NO: 9835 - protein, 9 aa, synthetic construct
  REGION 1..9: note = short peptide
LLCDLINKL

SEQ ID NO: 9836 - protein, 15 aa, synthetic construct
  REGION 1..15: note = short peptide
NKNISAIIQGIGKDK

SEQ ID NO: 9837 - protein, 12 aa, synthetic construct
  REGION 1..12: note = short peptide
KQARELLAALQK

SEQ ID NO: 9838 - protein, 9 aa, synthetic construct
  REGION 1..9: note = short peptide
VMIGSPKKV

SEQ ID NO: 9839 - protein, 11 aa, synthetic construct
  REGION 1..11: note = short peptide
MPAVKAIIYQY

SEQ ID NO: 9840 - protein, 9 aa, synthetic construct
  REGION 1..9: note = short peptide
RTVNVSVPK

SEQ ID NO: 9841 - protein, 9 aa, synthetic construct
  REGION 1..9: note = short peptide
RTYKSPLRH

SEQ ID NO: 9842 - protein, 8 aa, synthetic construct
  REGION 1..8: note = short peptide
KIDLGTTY

SEQ ID NO: 9843 - protein, 10 aa, synthetic construct
  REGION 1..10: note = short peptide
KLPSPAPARK

SEQ ID NO: 9844 - protein, 9 aa, synthetic construct
  REGION 1..9: note = short peptide
ALTNKAIVK

SEQ ID NO: 9845 - protein, 11 aa, synthetic construct
  REGION 1..11: note = short peptide
ALHVPKAPGFA

SEQ ID NO: 9846 - protein, 10 aa, synthetic construct
  REGION 1..10: note = short peptide
FGQGRGGGGY

SEQ ID NO: 9847 - protein, 10 aa, synthetic construct
  REGION 1..10: note = short peptide
GLLDVTCKTV

SEQ ID NO: 9848 - protein, 11 aa, synthetic construct
  REGION 1..11: note = short peptide
KLLKCSRLVLA

SEQ ID NO: 9849 - protein, 10 aa, synthetic construct
  REGION 1..10: note = short peptide
KLCGASFRTK

SEQ ID NO: 9850 - protein, 10 aa, synthetic construct
  REGION 1..10: note = short peptide
FLSYCPGMGV

SEQ ID NO: 9851 - protein, 11 aa, synthetic construct
  REGION 1..11: note = short peptide
ALSEAMGLFCL

SEQ ID NO: 9852 - protein, 9 aa, synthetic construct
  REGION 1..9: note = short peptide
ILCEHPNQV

SEQ ID NO: 9853 - protein, 9 aa, synthetic construct
  REGION 1..9: note = short peptide
RIKPPWVVK

SEQ ID NO: 9854 - protein, 10 aa, synthetic construct
  REGION 1..10: note = short peptide
KTSSKHQSPK

SEQ ID NO: 9855 - protein, 9 aa, synthetic construct
  REGION 1..9: note = short peptide
SSFGRGFFK

SEQ ID NO: 9856 - protein, 10 aa, synthetic construct
  REGION 1..10: note = short peptide
ALHVPKAPGF

SEQ ID NO: 9857 - protein, 10 aa, synthetic construct
  REGION 1..10: note = short peptide
NLLNHSSMFL

SEQ ID NO: 9858 - protein, 12 aa, synthetic construct
  REGION 1..12: note = short peptide
ALMNGSESRFFV

SEQ ID NO: 9859 - protein, 9 aa, synthetic construct
  REGION 1..9: note = short peptide
VLQNGGDKL

SEQ ID NO: 9860 - protein, 10 aa, synthetic construct
  REGION 1..10: note = short peptide
MPANNKCLIF

SEQ ID NO: 9861 - protein, 8 aa, synthetic construct
  REGION 1..8: note = short peptide
HAVDLIQK

SEQ ID NO: 9862 - protein, 9 aa, synthetic construct
  REGION 1..9: note = short peptide
TLCDVTLRV

SEQ ID NO: 9863 - protein, 10 aa, synthetic construct
  REGION 1..10: note = short peptide
GLLPGCVYHV

SEQ ID NO: 9864 - protein, 9 aa, synthetic construct
  REGION 1..9: note = short peptide
RIKPPWVVK

SEQ ID NO: 9865 - protein, 9 aa, synthetic construct
  REGION 1..9: note = short peptide
SHNLSLVIL

SEQ ID NO: 9866 - protein, 14 aa, synthetic construct
  REGION 1..14: note = short peptide
SVVRSSVHARWIVG

SEQ ID NO: 9867 - protein, 8 aa, synthetic construct
  REGION 1..8: note = short peptide
HLIKARAL

SEQ ID NO: 9868 - protein, 14 aa, synthetic construct
  REGION 1..14: note = short peptide
SGRGGFGGSRGGGG

SEQ ID NO: 9869 - protein, 9 aa, synthetic construct
  REGION 1..9: note = short peptide
KADSSPVKA

SEQ ID NO: 9870 - protein, 9 aa, synthetic construct
  REGION 1..9: note = short peptide
KVLSPTAAK

SEQ ID NO: 9871 - protein, 13 aa, synthetic construct
  REGION 1..13: note = short peptide
RLKSTCIYGGAPK

SEQ ID NO: 9872 - protein, 14 aa, synthetic construct
  REGION 1..14: note = short peptide
QAASSNSAQGSDVS

SEQ ID NO: 9873 - protein, 10 aa, synthetic construct
  REGION 1..10: note = short peptide
KLFTNDCIFL

SEQ ID NO: 9874 - protein, 10 aa, synthetic construct
  REGION 1..10: note = short peptide
IQNGSVKSFK

SEQ ID NO: 9875 - protein, 9 aa, synthetic construct
  REGION 1..9: note = short peptide
HSSGPMVEK

SEQ ID NO: 9876 - protein, 9 aa, synthetic construct
  REGION 1..9: note = short peptide
NTDEPPMVF

SEQ ID NO: 9877 - protein, 9 aa, synthetic construct
  REGION 1..9: note = short peptide
HLYYNVTEK

SEQ ID NO: 9878 - protein, 9 aa, synthetic construct
  REGION 1..9: note = short peptide
FENEMATAA

SEQ ID NO: 9879 - protein, 10 aa, synthetic construct
  REGION 1..10: note = short peptide
GIYPPGSPGK

SEQ ID NO: 9880 - protein, 9 aa, synthetic construct
  REGION 1..9: note = short peptide
AMVSEFLKQ

SEQ ID NO: 9881 - protein, 9 aa, synthetic construct
  REGION 1..9: note = short peptide
SLYNGSVCV

SEQ ID NO: 9882 - protein, 9 aa, synthetic construct
  REGION 1..9: note = short peptide
KLFSYCVKV

SEQ ID NO: 9883 - protein, 9 aa, synthetic construct
  REGION 1..9: note = short peptide
VMAPRTVLL

SEQ ID NO: 9884 - protein, 14 aa, synthetic construct
  REGION 1..14: note = short peptide
SELDQLRQEAEQLK

SEQ ID NO: 9885 - protein, 11 aa, synthetic construct
  REGION 1..11: note = short peptide
LMNGSESRFFV

SEQ ID NO: 9886 - protein, 11 aa, synthetic construct
  REGION 1..11: note = short peptide
KIFSGRKPMLY

SEQ ID NO: 9887 - protein, 9 aa, synthetic construct
  REGION 1..9: note = short peptide
HICTHAFFK

SEQ ID NO: 9888 - protein, 9 aa, synthetic construct
  REGION 1..9: note = short peptide
VVCEEPQVK

SEQ ID NO: 9889 - protein, 15 aa, synthetic construct
  REGION 1..15: note = short peptide
AGSGVRQATSTASTF

SEQ ID NO: 9890 - protein, 11 aa, synthetic construct
  REGION 1..11: note = short peptide
ALRGPPGPMGY

SEQ ID NO: 9891 - protein, 14 aa, synthetic construct
  REGION 1..14: note = short peptide
GGSGGGGGLRRSNS

SEQ ID NO: 9892 - protein, 9 aa, synthetic construct
  REGION 1..9: note = short peptide
VHGAGGGAF

SEQ ID NO: 9893 - protein, 9 aa, synthetic construct
  REGION 1..9: note = short peptide
AMVSEFLKQ

SEQ ID NO: 9894 - protein, 14 aa, synthetic construct
  REGION 1..14: note = short peptide
EESEKLSKMSSLLE

SEQ ID NO: 9895 - protein, 9 aa, synthetic construct
  REGION 1..9: note = short peptide
ATVLQTVPG

SEQ ID NO: 9896 - protein, 11 aa, synthetic construct
  REGION 1..11: note = short peptide
KTFTPCERLEK

SEQ ID NO: 9897 - protein, 8 aa, synthetic construct
  REGION 1..8: note = short peptide
DIGCGTGL

SEQ ID NO: 9898 - protein, 11 aa, synthetic construct
  REGION 1..11: note = short peptide
GSSGACGFSYK

SEQ ID NO: 9899 - protein, 9 aa, synthetic construct
  REGION 1..9: note = short peptide
KLCPNIKKK

SEQ ID NO: 9900 - protein, 8 aa, synthetic construct
  REGION 1..8: note = short peptide
TDDTPVVL

SEQ ID NO: 9901 - protein, 9 aa, synthetic construct
  REGION 1..9: note = short peptide
AIFPSPMLY

SEQ ID NO: 9902 - protein, 10 aa, synthetic construct
  REGION 1..10: note = short peptide
SPGYGGGRGG

SEQ ID NO: 9903 - protein, 9 aa, synthetic construct
  REGION 1..9: note = short peptide
AEDMETKIK

SEQ ID NO: 9904 - protein, 9 aa, synthetic construct
  REGION 1..9: note = short peptide
KIKHVVKLK

SEQ ID NO: 9905 - protein, 9 aa, synthetic construct
  REGION 1..9: note = short peptide
VLLLRSLPV

SEQ ID NO: 9906 - protein, 13 aa, synthetic construct
  REGION 1..13: note = short peptide
RVFGHSSGPMVEK

SEQ ID NO: 9907 - protein, 12 aa, synthetic construct
  REGION 1..12: note = short peptide
ATLKEKLIAPVA

SEQ ID NO: 9908 - protein, 11 aa, synthetic construct
  REGION 1..11: note = short peptide
KPAAVRPPAAA

SEQ ID NO: 9909 - protein, 12 aa, synthetic construct
  REGION 1..12: note = short peptide
TRDGQVINETSQ

SEQ ID NO: 9910 - protein, 9 aa, synthetic construct
  REGION 1..9: note = short peptide
SGRGGFGGS

SEQ ID NO: 9911 - protein, 11 aa, synthetic construct
  REGION 1..11: note = short peptide
KMQYATGPLLK

SEQ ID NO: 9912 - protein, 10 aa, synthetic construct
  REGION 1..10: note = short peptide
AMLRVQPEAQ

SEQ ID NO: 9913 - protein, 11 aa, synthetic construct
  REGION 1..11: note = short peptide
LGYKTVSGSCM

SEQ ID NO: 9914 - protein, 10 aa, synthetic construct
  REGION 1..10: note = short peptide
TEVEGTCTGK

SEQ ID NO: 9915 - protein, 9 aa, synthetic construct
  REGION 1..9: note = short peptide
RLHCKIDKV

SEQ ID NO: 9916 - protein, 15 aa, synthetic construct
  REGION 1..15: note = short peptide
QAASSNSAQGSDVSL

SEQ ID NO: 9917 - protein, 14 aa, synthetic construct
  REGION 1..14: note = short peptide
SSNSAQGSDVSLTA

SEQ ID NO: 9918 - protein, 12 aa, synthetic construct
  REGION 1..12: note = short peptide
ALCWGRGAAGLK

SEQ ID NO: 9919 - protein, 10 aa, synthetic construct
  REGION 1..10: note = short peptide
KISPKMPVCK

SEQ ID NO: 9920 - protein, 9 aa, synthetic construct
  REGION 1..9: note = short peptide
YLCDEQKEL

SEQ ID NO: 9921 - protein, 9 aa, synthetic construct
  REGION 1..9: note = short peptide
PFFLSPGAL

SEQ ID NO: 9922 - protein, 12 aa, synthetic construct
  REGION 1..12: note = short peptide
MDLSGVKKKSLL

SEQ ID NO: 9923 - protein, 9 aa, synthetic construct
  REGION 1..9: note = short peptide
KVLNLSLEY

SEQ ID NO: 9924 - protein, 10 aa, synthetic construct
  REGION 1..10: note = short peptide
LLAEVDLPKL

SEQ ID NO: 9925 - protein, 12 aa, synthetic construct
  REGION 1..12: note = short peptide
MPEGGGALAEGF

SEQ ID NO: 9926 - protein, 9 aa, synthetic construct
  REGION 1..9: note = short peptide
KLFNVTSTL

SEQ ID NO: 9927 - protein, 11 aa, synthetic construct
  REGION 1..11: note = short peptide
MDTSRVQPIKL

SEQ ID NO: 9928 - protein, 11 aa, synthetic construct
  REGION 1..11: note = short peptide
MPVGPDAILRY

SEQ ID NO: 9929 - protein, 11 aa, synthetic construct
  REGION 1..11: note = short peptide
KMVGNVTGAQA

SEQ ID NO: 9930 - protein, 8 aa, synthetic construct
  REGION 1..8: note = short peptide
CVAASPHK

SEQ ID NO: 9931 - protein, 8 aa, synthetic construct
  REGION 1..8: note = short peptide
APGPAAAF

SEQ ID NO: 9932 - protein, 9 aa, synthetic construct
  REGION 1..9: note = short peptide
RSSSPFLSK

SEQ ID NO: 9933 - protein, 9 aa, synthetic construct
  REGION 1..9: note = short peptide
SENPMTETF

SEQ ID NO: 9934 - protein, 9 aa, synthetic construct
  REGION 1..9: note = short peptide
ALTPPPLPA

SEQ ID NO: 9935 - protein, 11 aa, synthetic construct
  REGION 1..11: note = short peptide
SGNDGGLLSGS

SEQ ID NO: 9936 - protein, 12 aa, synthetic construct
  REGION 1..12: note = short peptide
RMKPAPGTGGLK

SEQ ID NO: 9937 - protein, 14 aa, synthetic construct
  REGION 1..14: note = short peptide
GTGYFGQGRGGGGY

SEQ ID NO: 9938 - protein, 9 aa, synthetic construct
  REGION 1..9: note = short peptide
AAASPVHLK

SEQ ID NO: 9939 - protein, 15 aa, synthetic construct
  REGION 1..15: note = short peptide
AATGANAEKAESHND

SEQ ID NO: 9940 - protein, 15 aa, synthetic construct
  REGION 1..15: note = short peptide
SKGPAVGIDLGTTYS

SEQ ID NO: 9941 - protein, 13 aa, synthetic construct
  REGION 1..13: note = short peptide
VLLGEGCVGKTSL

SEQ ID NO: 9942 - protein, 9 aa, synthetic construct
  REGION 1..9: note = short peptide
SESIGYTNF

SEQ ID NO: 9943 - protein, 9 aa, synthetic construct
  REGION 1..9: note = short peptide
LPKTCDISF

SEQ ID NO: 9944 - protein, 11 aa, synthetic construct
  REGION 1..11: note = short peptide
SGNDGGLLSGS

SEQ ID NO: 9945 - protein, 9 aa, synthetic construct
  REGION 1..9: note = short peptide
KFDPMGKYF

SEQ ID NO: 9946 - protein, 8 aa, synthetic construct
  REGION 1..8: note = short peptide
KPRAVAGK

SEQ ID NO: 9947 - protein, 11 aa, synthetic construct
  REGION 1..11: note = short peptide
LLDPKGSRQSL

SEQ ID NO: 9948 - protein, 10 aa, synthetic construct
  REGION 1..10: note = short peptide
SVLEARDLAP

SEQ ID NO: 9949 - protein, 9 aa, synthetic construct
  REGION 1..9: note = short peptide
AVAEKMLQY

SEQ ID NO: 9950 - protein, 10 aa, synthetic construct
  REGION 1..10: note = short peptide
ATYNKQPMYR

SEQ ID NO: 9951 - protein, 9 aa, synthetic construct
  REGION 1..9: note = short peptide
AVAIKAMAK

SEQ ID NO: 9952 - protein, 9 aa, synthetic construct
  REGION 1..9: note = short peptide
TKDVPITSV

SEQ ID NO: 9953 - protein, 11 aa, synthetic construct
  REGION 1..11: note = short peptide
LMNGSESRFFV

SEQ ID NO: 9954 - protein, 12 aa, synthetic construct
  REGION 1..12: note = short peptide
LNGCANPLGLKN

SEQ ID NO: 9955 - protein, 10 aa, synthetic construct
  REGION 1..10: note = short peptide
TVLCQPTGGK

SEQ ID NO: 9956 - protein, 12 aa, synthetic construct
  REGION 1..12: note = short peptide
LSWEGGGLKIAL

SEQ ID NO: 9957 - protein, 12 aa, synthetic construct
  REGION 1..12: note = short peptide
ALWKEPGSNVTM

SEQ ID NO: 9958 - protein, 11 aa, synthetic construct
  REGION 1..11: note = short peptide
TEWETAAPAVA

SEQ ID NO: 9959 - protein, 9 aa, synthetic construct
  REGION 1..9: note = short peptide
TGAAGKFKR

SEQ ID NO: 9960 - protein, 9 aa, synthetic construct
  REGION 1..9: note = short peptide
TGAAGKFKR

SEQ ID NO: 9961 - protein, 10 aa, synthetic construct
  REGION 1..10: note = short peptide
ADIQTERAYQ

SEQ ID NO: 9962 - protein, 11 aa, synthetic construct
  REGION 1..11: note = short peptide
RVSEQFTAMFR

SEQ ID NO: 9963 - protein, 10 aa, synthetic construct
  REGION 1..10: note = short peptide
RSSSPPILTK

SEQ ID NO: 9964 - protein, 8 aa, synthetic construct
  REGION 1..8: note = short peptide
KVEFKLNK

SEQ ID NO: 9965 - protein, 10 aa, synthetic construct
  REGION 1..10: note = short peptide
RMKDPTFLGK

SEQ ID NO: 9966 - protein, 9 aa, synthetic construct
  REGION 1..9: note = short peptide
RSESPPAEL

SEQ ID NO: 9967 - protein, 9 aa, synthetic construct
  REGION 1..9: note = short peptide
AAVLNAERL

SEQ ID NO: 9968 - protein, 14 aa, synthetic construct
  REGION 1..14: note = short peptide
HPGSSSGGRQGSHY

SEQ ID NO: 9969 - protein, 12 aa, synthetic construct
  REGION 1..12: note = short peptide
PAGVPMSTYLKM

SEQ ID NO: 9970 - protein, 11 aa, synthetic construct
  REGION 1..11: note = short peptide
SGNFGGGRGGG

SEQ ID NO: 9971 - protein, 13 aa, synthetic construct
  REGION 1..13: note = short peptide
SGSGNFGGGRGGG

SEQ ID NO: 9972 - protein, 14 aa, synthetic construct
  REGION 1..14: note = short peptide
PKWISIMTERSVPH

SEQ ID NO: 9973 - protein, 14 aa, synthetic construct
  REGION 1..14: note = short peptide
AGRKLALKTIDWVA

SEQ ID NO: 9974 - protein, 9 aa, synthetic construct
  REGION 1..9: note = short peptide
KYAGGTNDK

SEQ ID NO: 9975 - protein, 9 aa, synthetic construct
  REGION 1..9: note = short peptide
AEACVSRAL

SEQ ID NO: 9976 - protein, 9 aa, synthetic construct
  REGION 1..9: note = short peptide
YLDDLCVKI

SEQ ID NO: 9977 - protein, 10 aa, synthetic construct
  REGION 1..10: note = short peptide
KEICPAGKGY

SEQ ID NO: 9978 - protein, 9 aa, synthetic construct
  REGION 1..9: note = short peptide
RLKPEIQCV

SEQ ID NO: 9979 - protein, 13 aa, synthetic construct
  REGION 1..13: note = short peptide
SSNSAQGSDVSLT

SEQ ID NO: 9980 - protein, 12 aa, synthetic construct
  REGION 1..12: note = short peptide
LNGCANPLGLKN

SEQ ID NO: 9981 - protein, 10 aa, synthetic construct
  REGION 1..10: note = short peptide
TVLCQPTGGK

SEQ ID NO: 9982 - protein, 9 aa, synthetic construct
  REGION 1..9: note = short peptide
TVCDGSVFT

SEQ ID NO: 9983 - protein, 15 aa, synthetic construct
  REGION 1..15: note = short peptide
VETRPAGDGTFQKWV

SEQ ID NO: 9984 - protein, 11 aa, synthetic construct
  REGION 1..11: note = short peptide
LGWNDPDRMLL

SEQ ID NO: 9985 - protein, 8 aa, synthetic construct
  REGION 1..8: note = short peptide
VLGGKVYV

SEQ ID NO: 9986 - protein, 9 aa, synthetic construct
  REGION 1..9: note = short peptide
SDLEKSFNL

SEQ ID NO: 9987 - protein, 10 aa, synthetic construct
  REGION 1..10: note = short peptide
RVHPVSTMVK

SEQ ID NO: 9988 - protein, 9 aa, synthetic construct
  REGION 1..9: note = short peptide
TLMNIVNEI

SEQ ID NO: 9989 - protein, 9 aa, synthetic construct
  REGION 1..9: note = short peptide
TKCDFTVQV

SEQ ID NO: 9990 - protein, 12 aa, synthetic construct
  REGION 1..12: note = short peptide
MNDTVTIRTRKF

SEQ ID NO: 9991 - protein, 11 aa, synthetic construct
  REGION 1..11: note = short peptide
MPVRGPDVEAY

SEQ ID NO: 9992 - protein, 10 aa, synthetic construct
  REGION 1..10: note = short peptide
SPVAPPPAAP

SEQ ID NO: 9993 - protein, 9 aa, synthetic construct
  REGION 1..9: note = short peptide
MPLEDMNEF

SEQ ID NO: 9994 - protein, 10 aa, synthetic construct
  REGION 1..10: note = short peptide
GIISSPLTGK

SEQ ID NO: 9995 - protein, 15 aa, synthetic construct
  REGION 1..15: note = short peptide
FVKEFSHIAFLTIKG

SEQ ID NO: 9996 - protein, 9 aa, synthetic construct
  REGION 1..9: note = short peptide
KKLKEDCHT

SEQ ID NO: 9997 - protein, 11 aa, synthetic construct
  REGION 1..11: note = short peptide
KMLEENTNILK

SEQ ID NO: 9998 - protein, 10 aa, synthetic construct
  REGION 1..10: note = short peptide
KLLLLKKGSR

SEQ ID NO: 9999 - protein, 11 aa, synthetic construct
  REGION 1..11: note = short peptide
ALRGPPGPMGY

SEQ ID NO: 10000 - protein, 10 aa, synthetic construct
  REGION 1..10: note = short peptide
APVFPGRGSY

SEQ ID NO: 10001 - protein, 9 aa, synthetic construct
  REGION 1..9: note = short peptide
EEPTVIKKY

SEQ ID NO: 10002 - protein, 15 aa, synthetic construct
  REGION 1..15: note = short peptide
KNPLPSKETIEQEKQ

SEQ ID NO: 10003 - protein, 10 aa, synthetic construct
  REGION 1..10: note = short peptide
KSAPSTGGVK

SEQ ID NO: 10004 - protein, 8 aa, synthetic construct
  REGION 1..8: note = short peptide
TANGFPVF

SEQ ID NO: 10005 - protein, 9 aa, synthetic construct
  REGION 1..9: note = short peptide
YSIQKVIGF

SEQ ID NO: 10006 - protein, 9 aa, synthetic construct
  REGION 1..9: note = short peptide
RLYCESHAK

SEQ ID NO: 10007 - protein, 13 aa, synthetic construct
  REGION 1..13: note = short peptide
TPNPALKNGQYWV

SEQ ID NO: 10008 - protein, 9 aa, synthetic construct
  REGION 1..9: note = short peptide
GLTFPFICK

SEQ ID NO: 10009 - protein, 15 aa, synthetic construct
  REGION 1..15: note = short peptide
VETRPAGDGTFQKWV

SEQ ID NO: 10010 - protein, 9 aa, synthetic construct
  REGION 1..9: note = short peptide
TLMNIVNEI

SEQ ID NO: 10011 - protein, 9 aa, synthetic construct
  REGION 1..9: note = short peptide
RAKTPVTLK

SEQ ID NO: 10012 - protein, 9 aa, synthetic construct
  REGION 1..9: note = short peptide
KVKSPLKFQ

SEQ ID NO: 10013 - protein, 15 aa, synthetic construct
  REGION 1..15: note = short peptide
SRAQLGGPEAAKSDE

SEQ ID NO: 10014 - protein, 10 aa, synthetic construct
  REGION 1..10: note = short peptide
SRGGGGGGFH

SEQ ID NO: 10015 - protein, 9 aa, synthetic construct
  REGION 1..9: note = short peptide
SPAKARSPI

SEQ ID NO: 10016 - protein, 9 aa, synthetic construct
  REGION 1..9: note = short peptide
TASPVAVSL

SEQ ID NO: 10017 - protein, 11 aa, synthetic construct
  REGION 1..11: note = short peptide
DELDAIGTKRF

SEQ ID NO: 10018 - protein, 10 aa, synthetic construct
  REGION 1..10: note = short peptide
SGRGGFGGSR

SEQ ID NO: 10019 - protein, 11 aa, synthetic construct
  REGION 1..11: note = short peptide
GEAALNDPKMY

SEQ ID NO: 10020 - protein, 13 aa, synthetic construct
  REGION 1..13: note = short peptide
ALDEAAAALTRMK

SEQ ID NO: 10021 - protein, 10 aa, synthetic construct
  REGION 1..10: note = short peptide
KSNLTSPQTV

SEQ ID NO: 10022 - protein, 15 aa, synthetic construct
  REGION 1..15: note = short peptide
KGQKYFDSGDYNMAK

SEQ ID NO: 10023 - protein, 8 aa, synthetic construct
  REGION 1..8: note = short peptide
VDPIAGKL

SEQ ID NO: 10024 - protein, 9 aa, synthetic construct
  REGION 1..9: note = short peptide
LPEDLARMY

SEQ ID NO: 10025 - protein, 12 aa, synthetic construct
  REGION 1..12: note = short peptide
AMLRVQPEAQAK

SEQ ID NO: 10026 - protein, 10 aa, synthetic construct
  REGION 1..10: note = short peptide
KMALPMPTKR

SEQ ID NO: 10027 - protein, 9 aa, synthetic construct
  REGION 1..9: note = short peptide
AHDFNSVMY

SEQ ID NO: 10028 - protein, 13 aa, synthetic construct
  REGION 1..13: note = short peptide
ASSNSAQGSDVSL

SEQ ID NO: 10029 - protein, 10 aa, synthetic construct
  REGION 1..10: note = short peptide
GADGNIFVFN

SEQ ID NO: 10030 - protein, 10 aa, synthetic construct
  REGION 1..10: note = short peptide
KGDNKGVIYK

SEQ ID NO: 10031 - protein, 9 aa, synthetic construct
  REGION 1..9: note = short peptide
SLIGKGGCK

SEQ ID NO: 10032 - protein, 11 aa, synthetic construct
  REGION 1..11: note = short peptide
SDKPDMAEIEK

SEQ ID NO: 10033 - protein, 15 aa, synthetic construct
  REGION 1..15: note = short peptide
DKPDMAEIEKFDKSK

SEQ ID NO: 10034 - protein, 13 aa, synthetic construct
  REGION 1..13: note = short peptide
MPYGQPRPPILGY

SEQ ID NO: 10035 - protein, 9 aa, synthetic construct
  REGION 1..9: note = short peptide
SESELGRKW

SEQ ID NO: 10036 - protein, 11 aa, synthetic construct
  REGION 1..11: note = short peptide
AEPSAATQSHS

SEQ ID NO: 10037 - protein, 10 aa, synthetic construct
  REGION 1..10: note = short peptide
AEPSAATQSH

SEQ ID NO: 10038 - protein, 10 aa, synthetic construct
  REGION 1..10: note = short peptide
VLCPPPVKKR

SEQ ID NO: 10039 - protein, 10 aa, synthetic construct
  REGION 1..10: note = short peptide
GIYPPGSPGK

SEQ ID NO: 10040 - protein, 10 aa, synthetic construct
  REGION 1..10: note = short peptide
KLLNITNPVL

SEQ ID NO: 10041 - protein, 9 aa, synthetic construct
  REGION 1..9: note = short peptide
SMMSPMADR

SEQ ID NO: 10042 - protein, 9 aa, synthetic construct
  REGION 1..9: note = short peptide
SMMSPMADR

SEQ ID NO: 10043 - protein, 11 aa, synthetic construct
  REGION 1..11: note = short peptide
SAHLQWMVVRN

SEQ ID NO: 10044 - protein, 8 aa, synthetic construct
  REGION 1..8: note = short peptide
VAIKCVAK

SEQ ID NO: 10045 - protein, 10 aa, synthetic construct
  REGION 1..10: note = short peptide
AEDKENYKKF

SEQ ID NO: 10046 - protein, 13 aa, synthetic construct
  REGION 1..13: note = short peptide
MLQQSGSKNTGAK

SEQ ID NO: 10047 - protein, 10 aa, synthetic construct
  REGION 1..10: note = short peptide
AEEQVNRSAG

SEQ ID NO: 10048 - protein, 9 aa, synthetic construct
  REGION 1..9: note = short peptide
GVHGGLINK

SEQ ID NO: 10049 - protein, 11 aa, synthetic construct
  REGION 1..11: note = short peptide
SDKPDMAEIEK

SEQ ID NO: 10050 - protein, 9 aa, synthetic construct
  REGION 1..9: note = short peptide
RVDSPSHGL

SEQ ID NO: 10051 - protein, 9 aa, synthetic construct
  REGION 1..9: note = short peptide
RSHSPMSNR

SEQ ID NO: 10052 - protein, 11 aa, synthetic construct
  REGION 1..11: note = short peptide
LPYPVSPKQKY

SEQ ID NO: 10053 - protein, 9 aa, synthetic construct
  REGION 1..9: note = short peptide
SQGPPALGP

SEQ ID NO: 10054 - protein, 15 aa, synthetic construct
  REGION 1..15: note = short peptide
DVYKIGGIGTVPVGR

SEQ ID NO: 10055 - protein, 10 aa, synthetic construct
  REGION 1..10: note = short peptide
WEKSSNGRQW

SEQ ID NO: 10056 - protein, 8 aa, synthetic construct
  REGION 1..8: note = short peptide
QSNEMVLQ

SEQ ID NO: 10057 - protein, 10 aa, synthetic construct
  REGION 1..10: note = short peptide
HEACRGEVTW

SEQ ID NO: 10058 - protein, 10 aa, synthetic construct
  REGION 1..10: note = short peptide
AECNFTTKKY

SEQ ID NO: 10059 - protein, 9 aa, synthetic construct
  REGION 1..9: note = short peptide
SQGPPALGP

SEQ ID NO: 10060 - protein, 12 aa, synthetic construct
  REGION 1..12: note = short peptide
AASKPVEAAVVA

SEQ ID NO: 10061 - protein, 10 aa, synthetic construct
  REGION 1..10: note = short peptide
VLCPPPVKKR

SEQ ID NO: 10062 - protein, 13 aa, synthetic construct
  REGION 1..13: note = short peptide
AEPSAPESKHKSS

SEQ ID NO: 10063 - protein, 15 aa, synthetic construct
  REGION 1..15: note = short peptide
PWPQVLPTARPSPHG

SEQ ID NO: 10064 - protein, 10 aa, synthetic construct
  REGION 1..10: note = short peptide
EECGGVHIHF

SEQ ID NO: 10065 - protein, 13 aa, synthetic construct
  REGION 1..13: note = short peptide
AAAAVVEFQRAQS

SEQ ID NO: 10066 - protein, 9 aa, synthetic construct
  REGION 1..9: note = short peptide
ATYTPQAPK

SEQ ID NO: 10067 - protein, 14 aa, synthetic construct
  REGION 1..14: note = short peptide
ASGVAVSDGVIKVF

SEQ ID NO: 10068 - protein, 8 aa, synthetic construct
  REGION 1..8: note = short peptide
RVHKGSIK

SEQ ID NO: 10069 - protein, 9 aa, synthetic construct
  REGION 1..9: note = short peptide
KKNNPIAKK

SEQ ID NO: 10070 - protein, 9 aa, synthetic construct
  REGION 1..9: note = short peptide
KKNNPIAKK

SEQ ID NO: 10071 - protein, 10 aa, synthetic construct
  REGION 1..10: note = short peptide
RTASPPPPPK

SEQ ID NO: 10072 - protein, 9 aa, synthetic construct
  REGION 1..9: note = short peptide
VVMRDPNTK

SEQ ID NO: 10073 - protein, 10 aa, synthetic construct
  REGION 1..10: note = short peptide
RLAEWKATKL

SEQ ID NO: 10074 - protein, 10 aa, synthetic construct
  REGION 1..10: note = short peptide
RLAEWKATKL

SEQ ID NO: 10075 - protein, 10 aa, synthetic construct
  REGION 1..10: note = short peptide
KVKPPNLTTK

SEQ ID NO: 10076 - protein, 10 aa, synthetic construct
  REGION 1..10: note = short peptide
KVKPPNLTTK

SEQ ID NO: 10077 - protein, 11 aa, synthetic construct
  REGION 1..11: note = short peptide
AVYLSTCKDSK

SEQ ID NO: 10078 - protein, 9 aa, synthetic construct
  REGION 1..9: note = short peptide
KVSSPTKPK

SEQ ID NO: 10079 - protein, 10 aa, synthetic construct
  REGION 1..10: note = short peptide
KMPTTPVKAK

SEQ ID NO: 10080 - protein, 9 aa, synthetic construct
  REGION 1..9: note = short peptide
AINKCPLLK

SEQ ID NO: 10081 - protein, 10 aa, synthetic construct
  REGION 1..10: note = short peptide
RVKTPTSQSY

SEQ ID NO: 10082 - protein, 9 aa, synthetic construct
  REGION 1..9: note = short peptide
KNKAPGLGK

SEQ ID NO: 10083 - protein, 8 aa, synthetic construct
  REGION 1..8: note = short peptide
TGKTLIGK

SEQ ID NO: 10084 - protein, 9 aa, synthetic construct
  REGION 1..9: note = short peptide
RINQELSSK

SEQ ID NO: 10085 - protein, 9 aa, synthetic construct
  REGION 1..9: note = short peptide
KLFSVIKNK

SEQ ID NO: 10086 - protein, 9 aa, synthetic construct
  REGION 1..9: note = short peptide
MPVEKNITL

SEQ ID NO: 10087 - protein, 9 aa, synthetic construct
  REGION 1..9: note = short peptide
IEHGIITNW

SEQ ID NO: 10088 - protein, 9 aa, synthetic construct
  REGION 1..9: note = short peptide
TMGPRPAAA

SEQ ID NO: 10089 - protein, 15 aa, synthetic construct
  REGION 1..15: note = short peptide
SDEREVAEAATGEDA

SEQ ID NO: 10090 - protein, 10 aa, synthetic construct
  REGION 1..10: note = short peptide
KRASPTGGIK

SEQ ID NO: 10091 - protein, 9 aa, synthetic construct
  REGION 1..9: note = short peptide
RLLAKIICL

SEQ ID NO: 10092 - protein, 13 aa, synthetic construct
  REGION 1..13: note = short peptide
TGYFGQGRGGGGY

SEQ ID NO: 10093 - protein, 8 aa, synthetic construct
  REGION 1..8: note = short peptide
MFVPRSLK

SEQ ID NO: 10094 - protein, 10 aa, synthetic construct
  REGION 1..10: note = short peptide
EEDPGICRGY

SEQ ID NO: 10095 - protein, 8 aa, synthetic construct
  REGION 1..8: note = short peptide
RVWVRLFK

SEQ ID NO: 10096 - protein, 9 aa, synthetic construct
  REGION 1..9: note = short peptide
KKILKVMKK

SEQ ID NO: 10097 - protein, 9 aa, synthetic construct
  REGION 1..9: note = short peptide
GVFCKGLSR

SEQ ID NO: 10098 - protein, 8 aa, synthetic construct
  REGION 1..8: note = short peptide
KNLPRINK

SEQ ID NO: 10099 - protein, 8 aa, synthetic construct
  REGION 1..8: note = short peptide
KNLPRINK

SEQ ID NO: 10100 - protein, 10 aa, synthetic construct
  REGION 1..10: note = short peptide
LEHVGHNHTY

SEQ ID NO: 10101 - protein, 10 aa, synthetic construct
  REGION 1..10: note = short peptide
RLPSSTLKRP

SEQ ID NO: 10102 - protein, 8 aa, synthetic construct
  REGION 1..8: note = short peptide
LTKHKITH

SEQ ID NO: 10103 - protein, 10 aa, synthetic construct
  REGION 1..10: note = short peptide
RVFPSNVICK

SEQ ID NO: 10104 - protein, 9 aa, synthetic construct
  REGION 1..9: note = short peptide
RVCSIQRNR

SEQ ID NO: 10105 - protein, 10 aa, synthetic construct
  REGION 1..10: note = short peptide
EEVHDLERKY

SEQ ID NO: 10106 - protein, 8 aa, synthetic construct
  REGION 1..8: note = short peptide
HVSGGLLK

SEQ ID NO: 10107 - protein, 8 aa, synthetic construct
  REGION 1..8: note = short peptide
CVAASPHK

SEQ ID NO: 10108 - protein, 9 aa, synthetic construct
  REGION 1..9: note = short peptide
YHVNFSQAI

SEQ ID NO: 10109 - protein, 8 aa, synthetic construct
  REGION 1..8: note = short peptide
SSSPLSKK

SEQ ID NO: 10110 - protein, 12 aa, synthetic construct
  REGION 1..12: note = short peptide
EGEEEGDDKDDY

SEQ ID NO: 10111 - protein, 11 aa, synthetic construct
  REGION 1..11: note = short peptide
FPLSPTKLSQY

SEQ ID NO: 10112 - protein, 9 aa, synthetic construct
  REGION 1..9: note = short peptide
FLVEKQCAV

SEQ ID NO: 10113 - protein, 9 aa, synthetic construct
  REGION 1..9: note = short peptide
TNGRITHGF

SEQ ID NO: 10114 - protein, 9 aa, synthetic construct
  REGION 1..9: note = short peptide
EECPAVRLI

SEQ ID NO: 10115 - protein, 9 aa, synthetic construct
  REGION 1..9: note = short peptide
APFRSEVCF

SEQ ID NO: 10116 - protein, 9 aa, synthetic construct
  REGION 1..9: note = short peptide
SMLKPSGLK

SEQ ID NO: 10117 - protein, 8 aa, synthetic construct
  REGION 1..8: note = short peptide
KESALSKC

SEQ ID NO: 10118 - protein, 13 aa, synthetic construct
  REGION 1..13: note = short peptide
MPYPGGQGEAERF

SEQ ID NO: 10119 - protein, 10 aa, synthetic construct
  REGION 1..10: note = short peptide
RVLIVTKLNK

SEQ ID NO: 10120 - protein, 8 aa, synthetic construct
  REGION 1..8: note = short peptide
VLQAAVPK

SEQ ID NO: 10121 - protein, 9 aa, synthetic construct
  REGION 1..9: note = short peptide
SVFNKTLLK

SEQ ID NO: 10122 - protein, 11 aa, synthetic construct
  REGION 1..11: note = short peptide
TEHLSGCIQQW

SEQ ID NO: 10123 - protein, 10 aa, synthetic construct
  REGION 1..10: note = short peptide
TSSYGHVLER

SEQ ID NO: 10124 - protein, 10 aa, synthetic construct
  REGION 1..10: note = short peptide
YRNDQRNRPY

SEQ ID NO: 10125 - protein, 9 aa, synthetic construct
  REGION 1..9: note = short peptide
RTMTNALRK

SEQ ID NO: 10126 - protein, 10 aa, synthetic construct
  REGION 1..10: note = short peptide
TPIEGKNMSF

SEQ ID NO: 10127 - protein, 9 aa, synthetic construct
  REGION 1..9: note = short peptide
KAIANALKK

SEQ ID NO: 10128 - protein, 13 aa, synthetic construct
  REGION 1..13: note = short peptide
SLYRGGYSRFAPY

SEQ ID NO: 10129 - protein, 9 aa, synthetic construct
  REGION 1..9: note = short peptide
PAEQHPVLL

SEQ ID NO: 10130 - protein, 10 aa, synthetic construct
  REGION 1..10: note = short peptide
LLFRGCLIGA

SEQ ID NO: 10131 - protein, 11 aa, synthetic construct
  REGION 1..11: note = short peptide
KMPDMNIKAPK

SEQ ID NO: 10132 - protein, 9 aa, synthetic construct
  REGION 1..9: note = short peptide
RVYGHHWRA

SEQ ID NO: 10133 - protein, 9 aa, synthetic construct
  REGION 1..9: note = short peptide
RVYGHHWRA

SEQ ID NO: 10134 - protein, 9 aa, synthetic construct
  REGION 1..9: note = short peptide
RVYGHHWRA

SEQ ID NO: 10135 - protein, 8 aa, synthetic construct
  REGION 1..8: note = short peptide
MNHTVQTF

SEQ ID NO: 10136 - protein, 11 aa, synthetic construct
  REGION 1..11: note = short peptide
KMPDMNIKAPK

SEQ ID NO: 10137 - protein, 9 aa, synthetic construct
  REGION 1..9: note = short peptide
RSRSPGSYK

SEQ ID NO: 10138 - protein, 10 aa, synthetic construct
  REGION 1..10: note = short peptide
STRSVSSSSY

SEQ ID NO: 10139 - protein, 9 aa, synthetic construct
  REGION 1..9: note = short peptide
HGVAGVLVY

SEQ ID NO: 10140 - protein, 9 aa, synthetic construct
  REGION 1..9: note = short peptide
ATYGKPVHH

SEQ ID NO: 10141 - protein, 11 aa, synthetic construct
  REGION 1..11: note = short peptide
RLNSPPSSIYK

SEQ ID NO: 10142 - protein, 10 aa, synthetic construct
  REGION 1..10: note = short peptide
AEICAKSERY

SEQ ID NO: 10143 - protein, 10 aa, synthetic construct
  REGION 1..10: note = short peptide
KLLSCVLGPR

SEQ ID NO: 10144 - protein, 8 aa, synthetic construct
  REGION 1..8: note = short peptide
KTTKKQAK

SEQ ID NO: 10145 - protein, 8 aa, synthetic construct
  REGION 1..8: note = short peptide
KTTKKQAK

SEQ ID NO: 10146 - protein, 9 aa, synthetic construct
  REGION 1..9: note = short peptide
KCSKPNVQK

SEQ ID NO: 10147 - protein, 9 aa, synthetic construct
  REGION 1..9: note = short peptide
VSFQFPFPA

SEQ ID NO: 10148 - protein, 9 aa, synthetic construct
  REGION 1..9: note = short peptide
ATRLNGTAK

SEQ ID NO: 10149 - protein, 10 aa, synthetic construct
  REGION 1..10: note = short peptide
RVCDAVKALK

SEQ ID NO: 10150 - protein, 10 aa, synthetic construct
  REGION 1..10: note = short peptide
KLLNYAPLEK

SEQ ID NO: 10151 - protein, 10 aa, synthetic construct
  REGION 1..10: note = short peptide
YAFNGTQRFL

SEQ ID NO: 10152 - protein, 9 aa, synthetic construct
  REGION 1..9: note = short peptide
RSKTPPKSY

SEQ ID NO: 10153 - protein, 9 aa, synthetic construct
  REGION 1..9: note = short peptide
VLYDRVLKY

SEQ ID NO: 10154 - protein, 11 aa, synthetic construct
  REGION 1..11: note = short peptide
KTATAVAHCKR

SEQ ID NO: 10155 - protein, 11 aa, synthetic construct
  REGION 1..11: note = short peptide
KTATAVAHCKR

SEQ ID NO: 10156 - protein, 9 aa, synthetic construct
  REGION 1..9: note = short peptide
ATAEKCLHK

SEQ ID NO: 10157 - protein, 10 aa, synthetic construct
  REGION 1..10: note = short peptide
KGPPKALAYK

SEQ ID NO: 10158 - protein, 9 aa, synthetic construct
  REGION 1..9: note = short peptide
MPVEKNITL

SEQ ID NO: 10159 - protein, 9 aa, synthetic construct
  REGION 1..9: note = short peptide
LARPAALTA

SEQ ID NO: 10160 - protein, 9 aa, synthetic construct
  REGION 1..9: note = short peptide
YPVGGNVSF

SEQ ID NO: 10161 - protein, 9 aa, synthetic construct
  REGION 1..9: note = short peptide
QSNETALHY

SEQ ID NO: 10162 - protein, 10 aa, synthetic construct
  REGION 1..10: note = short peptide
CLDTAQRNLY

SEQ ID NO: 10163 - protein, 11 aa, synthetic construct
  REGION 1..11: note = short peptide
GTDKQNSTLRY

SEQ ID NO: 10164 - protein, 10 aa, synthetic construct
  REGION 1..10: note = short peptide
QSNETALHYF

SEQ ID NO: 10165 - protein, 10 aa, synthetic construct
  REGION 1..10: note = short peptide
LARPAALTAL

SEQ ID NO: 10166 - protein, 11 aa, synthetic construct
  REGION 1..11: note = short peptide
LARPAALTALL

SEQ ID NO: 10167 - protein, 9 aa, synthetic construct
  REGION 1..9: note = short peptide
TPINQNVSL

SEQ ID NO: 10168 - protein, 10 aa, synthetic construct
  REGION 1..10: note = short peptide
RVFPDKGYSF

SEQ ID NO: 10169 - protein, 10 aa, synthetic construct
  REGION 1..10: note = short peptide
ALPSRILLWK

SEQ ID NO: 10170 - protein, 10 aa, synthetic construct
  REGION 1..10: note = short peptide
ALPSRILLWK

SEQ ID NO: 10171 - protein, 10 aa, synthetic construct
  REGION 1..10: note = short peptide
ALPSRILLWK

SEQ ID NO: 10172 - protein, 10 aa, synthetic construct
  REGION 1..10: note = short peptide
ALPSRILLWK

SEQ ID NO: 10173 - protein, 9 aa, synthetic construct
  REGION 1..9: note = short peptide
IIYKNGTSK

SEQ ID NO: 10174 - protein, 9 aa, synthetic construct
  REGION 1..9: note = short peptide
LPNDFPTCL

SEQ ID NO: 10175 - protein, 9 aa, synthetic construct
  REGION 1..9: note = short peptide
NSCLNPILY

SEQ ID NO: 10176 - protein, 9 aa, synthetic construct
  REGION 1..9: note = short peptide
NSCMNPILY

SEQ ID NO: 10177 - protein, 9 aa, synthetic construct
  REGION 1..9: note = short peptide
HPGVNGPPL

SEQ ID NO: 10178 - protein, 8 aa, synthetic construct
  REGION 1..8: note = short peptide
QALKKKVL

SEQ ID NO: 10179 - protein, 15 aa, synthetic construct
  REGION 1..15: note = short peptide
STRSVSSSSYRRMFG

SEQ ID NO: 10180 - protein, 10 aa, synthetic construct
  REGION 1..10: note = short peptide
STNHTVNHTY

SEQ ID NO: 10181 - protein, 9 aa, synthetic construct
  REGION 1..9: note = short peptide
ININTSTSK

SEQ ID NO: 10182 - protein, 8 aa, synthetic construct
  REGION 1..8: note = short peptide
HPKYKTEL

SEQ ID NO: 10183 - protein, 9 aa, synthetic construct
  REGION 1..9: note = short peptide
YSCQTNNKY

SEQ ID NO: 10184 - protein, 10 aa, synthetic construct
  REGION 1..10: note = short peptide
TCIEAGALDY

SEQ ID NO: 10185 - protein, 14 aa, synthetic construct
  REGION 1..14: note = short peptide
SLYASSPGGVYATR

SEQ ID NO: 10186 - protein, 9 aa, synthetic construct
  REGION 1..9: note = short peptide
KTITHIVAK

SEQ ID NO: 10187 - protein, 9 aa, synthetic construct
  REGION 1..9: note = short peptide
FSCSTSLRY

SEQ ID NO: 10188 - protein, 11 aa, synthetic construct
  REGION 1..11: note = short peptide
APRASVPSVQI

SEQ ID NO: 10189 - protein, 12 aa, synthetic construct
  REGION 1..12: note = short peptide
APRPAAAAATAL

SEQ ID NO: 10190 - protein, 9 aa, synthetic construct
  REGION 1..9: note = short peptide
SFAPAGKSL

SEQ ID NO: 10191 - protein, 11 aa, synthetic construct
  REGION 1..11: note = short peptide
APRKQLATKAA

SEQ ID NO: 10192 - protein, 10 aa, synthetic construct
  REGION 1..10: note = short peptide
STNHTVNHTY

SEQ ID NO: 10193 - protein, 9 aa, synthetic construct
  REGION 1..9: note = short peptide
TPYTKPDAI

SEQ ID NO: 10194 - protein, 9 aa, synthetic construct
  REGION 1..9: note = short peptide
FTCKVPGLY

SEQ ID NO: 10195 - protein, 9 aa, synthetic construct
  REGION 1..9: note = short peptide
DLHCKFYQL

SEQ ID NO: 10196 - protein, 12 aa, synthetic construct
  REGION 1..12: note = short peptide
AAIRKKLVIVGD

SEQ ID NO: 10197 - protein, 10 aa, synthetic construct
  REGION 1..10: note = short peptide
RTFSNDKATK

SEQ ID NO: 10198 - protein, 11 aa, synthetic construct
  REGION 1..11: note = short peptide
NTAQANHTGFY

SEQ ID NO: 10199 - protein, 9 aa, synthetic construct
  REGION 1..9: note = short peptide
FTDCYKCFY

SEQ ID NO: 10200 - protein, 8 aa, synthetic construct
  REGION 1..8: note = short peptide
SQNGVQIY

SEQ ID NO: 10201 - protein, 9 aa, synthetic construct
  REGION 1..9: note = short peptide
NSCLNPMLY

SEQ ID NO: 10202 - protein, 11 aa, synthetic construct
  REGION 1..11: note = short peptide
KPSDAGTYVCL

SEQ ID NO: 10203 - protein, 8 aa, synthetic construct
  REGION 1..8: note = short peptide
KKLKEVQM

SEQ ID NO: 10204 - protein, 10 aa, synthetic construct
  REGION 1..10: note = short peptide
LPVRPQTNAL

SEQ ID NO: 10205 - protein, 9 aa, synthetic construct
  REGION 1..9: note = short peptide
FVNASRTLY

SEQ ID NO: 10206 - protein, 8 aa, synthetic construct
  REGION 1..8: note = short peptide
ACARPLIS

SEQ ID NO: 10207 - protein, 11 aa, synthetic construct
  REGION 1..11: note = short peptide
MPYGQPRPPIL

SEQ ID NO: 10208 - protein, 13 aa, synthetic construct
  REGION 1..13: note = short peptide
LTETWACSHSMRY

SEQ ID NO: 10209 - protein, 8 aa, synthetic construct
  REGION 1..8: note = short peptide
ACARPLIS

SEQ ID NO: 10210 - protein, 13 aa, synthetic construct
  REGION 1..13: note = short peptide
GPRGGKSSISSVL

SEQ ID NO: 10211 - protein, 9 aa, synthetic construct
  REGION 1..9: note = short peptide
TPVRPGSTM

SEQ ID NO: 10212 - protein, 8 aa, synthetic construct
  REGION 1..8: note = short peptide
LLKSKACF

SEQ ID NO: 10213 - protein, 9 aa, synthetic construct
  REGION 1..9: note = short peptide
YSCHLHHHY

SEQ ID NO: 10214 - protein, 15 aa, synthetic construct
  REGION 1..15: note = short peptide
SQVMREWEEAERQAK

SEQ ID NO: 10215 - protein, 10 aa, synthetic construct
  REGION 1..10: note = short peptide
PARHIRTVTL

SEQ ID NO: 10216 - protein, 11 aa, synthetic construct
  REGION 1..11: note = short peptide
YTDTSNHSSLK

SEQ ID NO: 10217 - protein, 10 aa, synthetic construct
  REGION 1..10: note = short peptide
QSCESALTHY

SEQ ID NO: 10218 - protein, 9 aa, synthetic construct
  REGION 1..9: note = short peptide
SVACPGAQK

SEQ ID NO: 10219 - protein, 10 aa, synthetic construct
  REGION 1..10: note = short peptide
STTGHCVHMR

SEQ ID NO: 10220 - protein, 9 aa, synthetic construct
  REGION 1..9: note = short peptide
TPRSKPVCI

SEQ ID NO: 10221 - protein, 9 aa, synthetic construct
  REGION 1..9: note = short peptide
SLLKKACQV

SEQ ID NO: 10222 - protein, 9 aa, synthetic construct
  REGION 1..9: note = short peptide
GQGRGGGGY

SEQ ID NO: 10223 - protein, 9 aa, synthetic construct
  REGION 1..9: note = short peptide
GHNISRVTF

SEQ ID NO: 10224 - protein, 9 aa, synthetic construct
  REGION 1..9: note = short peptide
WTCQWDLRY

SEQ ID NO: 10225 - protein, 10 aa, synthetic construct
  REGION 1..10: note = short peptide
LMDCRPQELY

SEQ ID NO: 10226 - protein, 8 aa, synthetic construct
  REGION 1..8: note = short peptide
KKRKKAVI

SEQ ID NO: 10227 - protein, 12 aa, synthetic construct
  REGION 1..12: note = short peptide
GPRGGKSSISSV

SEQ ID NO: 10228 - protein, 10 aa, synthetic construct
  REGION 1..10: note = short peptide
KPGGDSSSSL

SEQ ID NO: 10229 - protein, 10 aa, synthetic construct
  REGION 1..10: note = short peptide
SSAQNGSALK

SEQ ID NO: 10230 - protein, 12 aa, synthetic construct
  REGION 1..12: note = short peptide
APRIITGPAPVL

SEQ ID NO: 10231 - protein, 9 aa, synthetic construct
  REGION 1..9: note = short peptide
HSLAPMYYR

SEQ ID NO: 10232 - protein, 9 aa, synthetic construct
  REGION 1..9: note = short peptide
YVRDCVEAL

SEQ ID NO: 10233 - protein, 9 aa, synthetic construct
  REGION 1..9: note = short peptide
TMYPGSCVK

SEQ ID NO: 10234 - protein, 9 aa, synthetic construct
  REGION 1..9: note = short peptide
TPRSPPLGL

SEQ ID NO: 10235 - protein, 15 aa, synthetic construct
  REGION 1..15: note = short peptide
HKAVLTIDEKGTEAA

SEQ ID NO: 10236 - protein, 10 aa, synthetic construct
  REGION 1..10: note = short peptide
HHINDTDTIL

SEQ ID NO: 10237 - protein, 9 aa, synthetic construct
  REGION 1..9: note = short peptide
IIYKGGTSR

SEQ ID NO: 10238 - protein, 9 aa, synthetic construct
  REGION 1..9: note = short peptide
KPAAVRPPA

SEQ ID NO: 10239 - protein, 10 aa, synthetic construct
  REGION 1..10: note = short peptide
VHNASAHLTF

SEQ ID NO: 10240 - protein, 9 aa, synthetic construct
  REGION 1..9: note = short peptide
THNNKTVSL

SEQ ID NO: 10241 - protein, 10 aa, synthetic construct
  REGION 1..10: note = short peptide
GPRGLLPLCL

SEQ ID NO: 10242 - protein, 9 aa, synthetic construct
  REGION 1..9: note = short peptide
TGQILKQTY

SEQ ID NO: 10243 - protein, 9 aa, synthetic construct
  REGION 1..9: note = short peptide
YTCNLHHHY

SEQ ID NO: 10244 - protein, 9 aa, synthetic construct
  REGION 1..9: note = short peptide
NSCLNPMLY

SEQ ID NO: 10245 - protein, 9 aa, synthetic construct
  REGION 1..9: note = short peptide
NSNLTDNQY

SEQ ID NO: 10246 - protein, 10 aa, synthetic construct
  REGION 1..10: note = short peptide
DHDLEAQLIY

SEQ ID NO: 10247 - protein, 9 aa, synthetic construct
  REGION 1..9: note = short peptide
RLLNATHQI

SEQ ID NO: 10248 - protein, 9 aa, synthetic construct
  REGION 1..9: note = short peptide
RLTCRILLH

SEQ ID NO: 10249 - protein, 8 aa, synthetic construct
  REGION 1..8: note = short peptide
DPNTHHCL

SEQ ID NO: 10250 - protein, 12 aa, synthetic construct
  REGION 1..12: note = short peptide
TTKTADGKCAYR

SEQ ID NO: 10251 - protein, 9 aa, synthetic construct
  REGION 1..9: note = short peptide
YTCPTEEEY

SEQ ID NO: 10252 - protein, 10 aa, synthetic construct
  REGION 1..10: note = short peptide
HHCPDVPILL

SEQ ID NO: 10253 - protein, 9 aa, synthetic construct
  REGION 1..9: note = short peptide
FMCRKKVGL

SEQ ID NO: 10254 - protein, 10 aa, synthetic construct
  REGION 1..10: note = short peptide
KPQQVRNMTL

SEQ ID NO: 10255 - protein, 9 aa, synthetic construct
  REGION 1..9: note = short peptide
HHNKLRLCF

SEQ ID NO: 10256 - protein, 10 aa, synthetic construct
  REGION 1..10: note = short peptide
DHDLEAQLIY

SEQ ID NO: 10257 - protein, 10 aa, synthetic construct
  REGION 1..10: note = short peptide
GIAEFPSRGK

SEQ ID NO: 10258 - protein, 10 aa, synthetic construct
  REGION 1..10: note = short peptide
RPSRKRGRRP

SEQ ID NO: 10259 - protein, 9 aa, synthetic construct
  REGION 1..9: note = short peptide
THEGFNVTL

SEQ ID NO: 10260 - protein, 10 aa, synthetic construct
  REGION 1..10: note = short peptide
MYGSARSVGK

SEQ ID NO: 10261 - protein, 8 aa, synthetic construct
  REGION 1..8: note = short peptide
KKDPSRKK

SEQ ID NO: 10262 - protein, 9 aa, synthetic construct
  REGION 1..9: note = short peptide
GRLNVLANV

SEQ ID NO: 10263 - protein, 9 aa, synthetic construct
  REGION 1..9: note = short peptide
HPRLPMAQF

SEQ ID NO: 10264 - protein, 9 aa, synthetic construct
  REGION 1..9: note = short peptide
QPAQNHSSL

SEQ ID NO: 10265 - protein, 9 aa, synthetic construct
  REGION 1..9: note = short peptide
STNGTHASY

SEQ ID NO: 10266 - protein, 13 aa, synthetic construct
  REGION 1..13: note = short peptide
FTENMGQCKSLEY

SEQ ID NO: 10267 - protein, 9 aa, synthetic construct
  REGION 1..9: note = short peptide
QRDCTFLRI

SEQ ID NO: 10268 - protein, 9 aa, synthetic construct
  REGION 1..9: note = short peptide
NSCMNPILY

SEQ ID NO: 10269 - protein, 10 aa, synthetic construct
  REGION 1..10: note = short peptide
HHNCSESLEL

SEQ ID NO: 10270 - protein, 9 aa, synthetic construct
  REGION 1..9: note = short peptide
AQFPGACGL

SEQ ID NO: 10271 - protein, 9 aa, synthetic construct
  REGION 1..9: note = short peptide
VPACARSTL

SEQ ID NO: 10272 - protein, 10 aa, synthetic construct
  REGION 1..10: note = short peptide
HHNCSESLEL

SEQ ID NO: 10273 - protein, 10 aa, synthetic construct
  REGION 1..10: note = short peptide
HHNCSESLEL

SEQ ID NO: 10274 - protein, 9 aa, synthetic construct
  REGION 1..9: note = short peptide
HPNPGGHPA

SEQ ID NO: 10275 - protein, 10 aa, synthetic construct
  REGION 1..10: note = short peptide
YSDLNTQRPY

SEQ ID NO: 10276 - protein, 10 aa, synthetic construct
  REGION 1..10: note = short peptide
RVNRGGGPIR

SEQ ID NO: 10277 - protein, 9 aa, synthetic construct
  REGION 1..9: note = short peptide
YHTDCNVLL

SEQ ID NO: 10278 - protein, 9 aa, synthetic construct
  REGION 1..9: note = short peptide
DHCKYKYLF

SEQ ID NO: 10279 - protein, 9 aa, synthetic construct
  REGION 1..9: note = short peptide
HVKNGEVGR

SEQ ID NO: 10280 - protein, 8 aa, synthetic construct
  REGION 1..8: note = short peptide
EAVVRCTL

SEQ ID NO: 10281 - protein, 9 aa, synthetic construct
  REGION 1..9: note = short peptide
HASPILPIT

SEQ ID NO: 10282 - protein, 9 aa, synthetic construct
  REGION 1..9: note = short peptide
EHVGNKTTI

SEQ ID NO: 10283 - protein, 11 aa, synthetic construct
  REGION 1..11: note = short peptide
AASTASHRPIK

SEQ ID NO: 10284 - protein, 9 aa, synthetic construct
  REGION 1..9: note = short peptide
RSKNDSKPY

SEQ ID NO: 10285 - protein, 9 aa, synthetic construct
  REGION 1..9: note = short peptide
LLYESPERY

SEQ ID NO: 10286 - protein, 10 aa, synthetic construct
  REGION 1..10: note = short peptide
QPRAPGPHAM

SEQ ID NO: 10287 - protein, 10 aa, synthetic construct
  REGION 1..10: note = short peptide
QPRAPGPHAM

SEQ ID NO: 10288 - protein, 10 aa, synthetic construct
  REGION 1..10: note = short peptide
VPRYPNAVGF

SEQ ID NO: 10289 - protein, 10 aa, synthetic construct
  REGION 1..10: note = short peptide
KPKEPASCLL

SEQ ID NO: 10290 - protein, 8 aa, synthetic construct
  REGION 1..8: note = short peptide
KEQRHTLR

SEQ ID NO: 10291 - protein, 9 aa, synthetic construct
  REGION 1..9: note = short peptide
VQSTSFCLR

SEQ ID NO: 10292 - protein, 9 aa, synthetic construct
  REGION 1..9: note = short peptide
RPAFVPHVL

SEQ ID NO: 10293 - protein, 9 aa, synthetic construct
  REGION 1..9: note = short peptide
PQNLPPLSI

SEQ ID NO: 10294 - protein, 15 aa, synthetic construct
  REGION 1..15: note = short peptide
KTNESVSEPRKGFMY

SEQ ID NO: 10295 - protein, 11 aa, synthetic construct
  REGION 1..11: note = short peptide
STRSVSSSSYR

SEQ ID NO: 10296 - protein, 10 aa, synthetic construct
  REGION 1..10: note = short peptide
THENQTKPSI

SEQ ID NO: 10297 - protein, 9 aa, synthetic construct
  REGION 1..9: note = short peptide
HVNNSNLNY

SEQ ID NO: 10298 - protein, 12 aa, synthetic construct
  REGION 1..12: note = short peptide
GLPAVPAVTLYK

SEQ ID NO: 10299 - protein, 9 aa, synthetic construct
  REGION 1..9: note = short peptide
AHSVPSPAF

SEQ ID NO: 10300 - protein, 11 aa, synthetic construct
  REGION 1..11: note = short peptide
RAHTPTPGIYM

SEQ ID NO: 10301 - protein, 9 aa, synthetic construct
  REGION 1..9: note = short peptide
KRVGEGAVK

SEQ ID NO: 10302 - protein, 11 aa, synthetic construct
  REGION 1..11: note = short peptide
NHDPNTHHCLC

SEQ ID NO: 10303 - protein, 9 aa, synthetic construct
  REGION 1..9: note = short peptide
KVDHHTDKY

SEQ ID NO: 10304 - protein, 11 aa, synthetic construct
  REGION 1..11: note = short peptide
AVRPPAAAAAK

SEQ ID NO: 10305 - protein, 9 aa, synthetic construct
  REGION 1..9: note = short peptide
QQKLRVCEV

SEQ ID NO: 10306 - protein, 9 aa, synthetic construct
  REGION 1..9: note = short peptide
HHCEAVLHL

SEQ ID NO: 10307 - protein, 10 aa, synthetic construct
  REGION 1..10: note = short peptide
THASCHVQFF

SEQ ID NO: 10308 - protein, 9 aa, synthetic construct
  REGION 1..9: note = short peptide
KAQEHRAEM

SEQ ID NO: 10309 - protein, 9 aa, synthetic construct
  REGION 1..9: note = short peptide
FHCAATVRF

SEQ ID NO: 10310 - protein, 10 aa, synthetic construct
  REGION 1..10: note = short peptide
HPVLAQCDVF

SEQ ID NO: 10311 - protein, 10 aa, synthetic construct
  REGION 1..10: note = short peptide
VVDTGTNACY

SEQ ID NO: 10312 - protein, 9 aa, synthetic construct
  REGION 1..9: note = short peptide
AHSVPSPAF

SEQ ID NO: 10313 - protein, 9 aa, synthetic construct
  REGION 1..9: note = short peptide
GPRGGGACL

SEQ ID NO: 10314 - protein, 11 aa, synthetic construct
  REGION 1..11: note = short peptide
NHDPNTHHCLC

SEQ ID NO: 10315 - protein, 9 aa, synthetic construct
  REGION 1..9: note = short peptide
NPNSPSAQL

SEQ ID NO: 10316 - protein, 9 aa, synthetic construct
  REGION 1..9: note = short peptide
SQRSPKASL

SEQ ID NO: 10317 - protein, 12 aa, synthetic construct
  REGION 1..12: note = short peptide
SGYGGQTKPIFR

SEQ ID NO: 10318 - protein, 8 aa, synthetic construct
  REGION 1..8: note = short peptide
PSRILLWK

SEQ ID NO: 10319 - protein, 8 aa, synthetic construct
  REGION 1..8: note = short peptide
RVKRPHLR

SEQ ID NO: 10320 - protein, 10 aa, synthetic construct
  REGION 1..10: note = short peptide
RVFHIHNESW

SEQ ID NO: 10321 - protein, 8 aa, synthetic construct
  REGION 1..8: note = short peptide
KDNRAVQK

SEQ ID NO: 10322 - protein, 9 aa, synthetic construct
  REGION 1..9: note = short peptide
TPVRPGSTM

SEQ ID NO: 10323 - protein, 10 aa, synthetic construct
  REGION 1..10: note = short peptide
KPRAPGNLTV

SEQ ID NO: 10324 - protein, 10 aa, synthetic construct
  REGION 1..10: note = short peptide
TRLSITNETF

SEQ ID NO: 10325 - protein, 9 aa, synthetic construct
  REGION 1..9: note = short peptide
SHHANGNKL

SEQ ID NO: 10326 - protein, 11 aa, synthetic construct
  REGION 1..11: note = short peptide
NHDRPDVCILF

SEQ ID NO: 10327 - protein, 14 aa, synthetic construct
  REGION 1..14: note = short peptide
HPAENGKSNFLNCY

SEQ ID NO: 10328 - protein, 10 aa, synthetic construct
  REGION 1..10: note = short peptide
THVCDPSVKF

SEQ ID NO: 10329 - protein, 9 aa, synthetic construct
  REGION 1..9: note = short peptide
TLCHILNLY

SEQ ID NO: 10330 - protein, 9 aa, synthetic construct
  REGION 1..9: note = short peptide
AATCNHTVM

SEQ ID NO: 10331 - protein, 9 aa, synthetic construct
  REGION 1..9: note = short peptide
THHKLCTFI

SEQ ID NO: 10332 - protein, 9 aa, synthetic construct
  REGION 1..9: note = short peptide
QHDQCHSHF

SEQ ID NO: 10333 - protein, 9 aa, synthetic construct
  REGION 1..9: note = short peptide
RQNPCLVTR

SEQ ID NO: 10334 - protein, 9 aa, synthetic construct
  REGION 1..9: note = short peptide
HGLCRKESL

SEQ ID NO: 10335 - protein, 12 aa, synthetic construct
  REGION 1..12: note = short peptide
VHIQAGQCGNQI

SEQ ID NO: 10336 - protein, 9 aa, synthetic construct
  REGION 1..9: note = short peptide
ASNSLFHCR

SEQ ID NO: 10337 - protein, 9 aa, synthetic construct
  REGION 1..9: note = short peptide
GPRGGGACL

SEQ ID NO: 10338 - protein, 9 aa, synthetic construct
  REGION 1..9: note = short peptide
NPNSPSAQL

SEQ ID NO: 10339 - protein, 8 aa, synthetic construct
  REGION 1..8: note = short peptide
PSRILLWK

SEQ ID NO: 10340 - protein, 9 aa, synthetic construct
  REGION 1..9: note = short peptide
HHINDTDTI

SEQ ID NO: 10341 - protein, 10 aa, synthetic construct
  REGION 1..10: note = short peptide
DAGLLSFATF

SEQ ID NO: 10342 - protein, 10 aa, synthetic construct
  REGION 1..10: note = short peptide
KYINTTLVSR

SEQ ID NO: 10343 - protein, 9 aa, synthetic construct
  REGION 1..9: note = short peptide
LHASNATLL

SEQ ID NO: 10344 - protein, 8 aa, synthetic construct
  REGION 1..8: note = short peptide
SDSGEQNY

SEQ ID NO: 10345 - protein, 10 aa, synthetic construct
  REGION 1..10: note = short peptide
LPKRRCTASV

SEQ ID NO: 10346 - protein, 9 aa, synthetic construct
  REGION 1..9: note = short peptide
PSNGSMHNY

SEQ ID NO: 10347 - protein, 10 aa, synthetic construct
  REGION 1..10: note = short peptide
GHTHFGNDNF

SEQ ID NO: 10348 - protein, 10 aa, synthetic construct
  REGION 1..10: note = short peptide
APAGGSPRML

SEQ ID NO: 10349 - protein, 11 aa, synthetic construct
  REGION 1..11: note = short peptide
KPAGPPGILAL

SEQ ID NO: 10350 - protein, 9 aa, synthetic construct
  REGION 1..9: note = short peptide
FHNDTKVVF

SEQ ID NO: 10351 - protein, 9 aa, synthetic construct
  REGION 1..9: note = short peptide
QRNQTNTFF

SEQ ID NO: 10352 - protein, 8 aa, synthetic construct
  REGION 1..8: note = short peptide
SPVLKRHL

SEQ ID NO: 10353 - protein, 15 aa, synthetic construct
  REGION 1..15: note = short peptide
SRQVVRSSKFRHVFG

SEQ ID NO: 10354 - protein, 9 aa, synthetic construct
  REGION 1..9: note = short peptide
SPNDRSLYL

SEQ ID NO: 10355 - protein, 9 aa, synthetic construct
  REGION 1..9: note = short peptide
HTDILKEKY

SEQ ID NO: 10356 - protein, 9 aa, synthetic construct
  REGION 1..9: note = short peptide
KGKLSNGKK

SEQ ID NO: 10357 - protein, 9 aa, synthetic construct
  REGION 1..9: note = short peptide
NSCLNPLIY

SEQ ID NO: 10358 - protein, 11 aa, synthetic construct
  REGION 1..11: note = short peptide
RPQCPVGFNTL

SEQ ID NO: 10359 - protein, 9 aa, synthetic construct
  REGION 1..9: note = short peptide
DHVECLQLL

SEQ ID NO: 10360 - protein, 10 aa, synthetic construct
  REGION 1..10: note = short peptide
EHDKACVRTF

SEQ ID NO: 10361 - protein, 10 aa, synthetic construct
  REGION 1..10: note = short peptide
FHIIPDGNCL

SEQ ID NO: 10362 - protein, 11 aa, synthetic construct
  REGION 1..11: note = short peptide
VHNITVCEQKI

SEQ ID NO: 10363 - protein, 9 aa, synthetic construct
  REGION 1..9: note = short peptide
THCISAVLL

SEQ ID NO: 10364 - protein, 10 aa, synthetic construct
  REGION 1..10: note = short peptide
KMVDQLFCKK

SEQ ID NO: 10365 - protein, 9 aa, synthetic construct
  REGION 1..9: note = short peptide
CHDKETYKL

SEQ ID NO: 10366 - protein, 9 aa, synthetic construct
  REGION 1..9: note = short peptide
AHQSNGNQL

SEQ ID NO: 10367 - protein, 9 aa, synthetic construct
  REGION 1..9: note = short peptide
NHSGAVVLL

SEQ ID NO: 10368 - protein, 9 aa, synthetic construct
  REGION 1..9: note = short peptide
FQYPCSKAK

SEQ ID NO: 10369 - protein, 9 aa, synthetic construct
  REGION 1..9: note = short peptide
YHALCNEEF

SEQ ID NO: 10370 - protein, 11 aa, synthetic construct
  REGION 1..11: note = short peptide
KPDFKRSIVCL

SEQ ID NO: 10371 - protein, 11 aa, synthetic construct
  REGION 1..11: note = short peptide
VHNITVCEQKI

SEQ ID NO: 10372 - protein, 11 aa, synthetic construct
  REGION 1..11: note = short peptide
VHNITVCEQKI

SEQ ID NO: 10373 - protein, 14 aa, synthetic construct
  REGION 1..14: note = short peptide
YNRGDSTFESKSYK

SEQ ID NO: 10374 - protein, 13 aa, synthetic construct
  REGION 1..13: note = short peptide
APRPPSSGLPAVL

SEQ ID NO: 10375 - protein, 10 aa, synthetic construct
  REGION 1..10: note = short peptide
TQNDTGFYTL

SEQ ID NO: 10376 - protein, 9 aa, synthetic construct
  REGION 1..9: note = short peptide
LRFKKGQCL

SEQ ID NO: 10377 - protein, 13 aa, synthetic construct
  REGION 1..13: note = short peptide
SGGKYVDSEGHLY

SEQ ID NO: 10378 - protein, 10 aa, synthetic construct
  REGION 1..10: note = short peptide
APRKQLATKA

SEQ ID NO: 10379 - protein, 9 aa, synthetic construct
  REGION 1..9: note = short peptide
APRKPDWDL

SEQ ID NO: 10380 - protein, 14 aa, synthetic construct
  REGION 1..14: note = short peptide
KQSGYGGQTKPIFR

SEQ ID NO: 10381 - protein, 9 aa, synthetic construct
  REGION 1..9: note = short peptide
HVSNVTVNY

SEQ ID NO: 10382 - protein, 9 aa, synthetic construct
  REGION 1..9: note = short peptide
GQSSPQRSY

SEQ ID NO: 10383 - protein, 9 aa, synthetic construct
  REGION 1..9: note = short peptide
VPVVNGTSF

SEQ ID NO: 10384 - protein, 10 aa, synthetic construct
  REGION 1..10: note = short peptide
QPRAPGPHAM

SEQ ID NO: 10385 - protein, 8 aa, synthetic construct
  REGION 1..8: note = short peptide
RPRSPTGP

SEQ ID NO: 10386 - protein, 9 aa, synthetic construct
  REGION 1..9: note = short peptide
RPWSNSRGL

SEQ ID NO: 10387 - protein, 15 aa, synthetic construct
  REGION 1..15: note = short peptide
RYYNQSEAGSHIIQR

SEQ ID NO: 10388 - protein, 9 aa, synthetic construct
  REGION 1..9: note = short peptide
VHNFSKPVL

SEQ ID NO: 10389 - protein, 11 aa, synthetic construct
  REGION 1..11: note = short peptide
VYVNYTILKPR

SEQ ID NO: 10390 - protein, 10 aa, synthetic construct
  REGION 1..10: note = short peptide
VHSHLQGEVF

SEQ ID NO: 10391 - protein, 11 aa, synthetic construct
  REGION 1..11: note = short peptide
RYKEGRVILER

SEQ ID NO: 10392 - protein, 9 aa, synthetic construct
  REGION 1..9: note = short peptide
YFPHTAIRY

SEQ ID NO: 10393 - protein, 10 aa, synthetic construct
  REGION 1..10: note = short peptide
RYRPGTVALR

SEQ ID NO: 10394 - protein, 9 aa, synthetic construct
  REGION 1..9: note = short peptide
MIDPTKARY

SEQ ID NO: 10395 - protein, 9 aa, synthetic construct
  REGION 1..9: note = short peptide
ATEKHLQKY

SEQ ID NO: 10396 - protein, 9 aa, synthetic construct
  REGION 1..9: note = short peptide
NHNGSPLSI

SEQ ID NO: 10397 - protein, 12 aa, synthetic construct
  REGION 1..12: note = short peptide
NHDPNTHHCLCG

SEQ ID NO: 10398 - protein, 8 aa, synthetic construct
  REGION 1..8: note = short peptide
SHNRNHLT

SEQ ID NO: 10399 - protein, 9 aa, synthetic construct
  REGION 1..9: note = short peptide
SLYRGGYSR

SEQ ID NO: 10400 - protein, 8 aa, synthetic construct
  REGION 1..8: note = short peptide
IPQKTLLL

SEQ ID NO: 10401 - protein, 9 aa, synthetic construct
  REGION 1..9: note = short peptide
RPLSVRCTL

SEQ ID NO: 10402 - protein, 9 aa, synthetic construct
  REGION 1..9: note = short peptide
DHIIDICFL

SEQ ID NO: 10403 - protein, 9 aa, synthetic construct
  REGION 1..9: note = short peptide
DHQLCKEEI

SEQ ID NO: 10404 - protein, 9 aa, synthetic construct
  REGION 1..9: note = short peptide
THCPSNNVI

SEQ ID NO: 10405 - protein, 9 aa, synthetic construct
  REGION 1..9: note = short peptide
HQDSNCNGI

SEQ ID NO: 10406 - protein, 11 aa, synthetic construct
  REGION 1..11: note = short peptide
YPICEAALPKF

SEQ ID NO: 10407 - protein, 10 aa, synthetic construct
  REGION 1..10: note = short peptide
GIACGSHVTY

SEQ ID NO: 10408 - protein, 9 aa, synthetic construct
  REGION 1..9: note = short peptide
RHDNQCILI

SEQ ID NO: 10409 - protein, 9 aa, synthetic construct
  REGION 1..9: note = short peptide
HHCKEGILI

SEQ ID NO: 10410 - protein, 9 aa, synthetic construct
  REGION 1..9: note = short peptide
HHFKYPCVL

SEQ ID NO: 10411 - protein, 9 aa, synthetic construct
  REGION 1..9: note = short peptide
AVFDGCHYY

SEQ ID NO: 10412 - protein, 9 aa, synthetic construct
  REGION 1..9: note = short peptide
VHDCVNITI

SEQ ID NO: 10413 - protein, 9 aa, synthetic construct
  REGION 1..9: note = short peptide
APRKPDWDL

SEQ ID NO: 10414 - protein, 9 aa, synthetic construct
  REGION 1..9: note = short peptide
RPWSNSRGL

SEQ ID NO: 10415 - protein, 8 aa, synthetic construct
  REGION 1..8: note = short peptide
SHNRNHLT

SEQ ID NO: 10416 - protein, 12 aa, synthetic construct
  REGION 1..12: note = short peptide
RSRGGGGGGFHR

SEQ ID NO: 10417 - protein, 11 aa, synthetic construct
  REGION 1..11: note = short peptide
MPYGQPRPPIL

SEQ ID NO: 10418 - protein, 11 aa, synthetic construct
  REGION 1..11: note = short peptide
SPRGGTPGSGA

SEQ ID NO: 10419 - protein, 9 aa, synthetic construct
  REGION 1..9: note = short peptide
RVGRPAALR

SEQ ID NO: 10420 - protein, 10 aa, synthetic construct
  REGION 1..10: note = short peptide
GPRGGLGGGM

SEQ ID NO: 10421 - protein, 9 aa, synthetic construct
  REGION 1..9: note = short peptide
AHNNGNHTF

SEQ ID NO: 10422 - protein, 9 aa, synthetic construct
  REGION 1..9: note = short peptide
AHDSNVLHV

SEQ ID NO: 10423 - protein, 9 aa, synthetic construct
  REGION 1..9: note = short peptide
HSKNMTISR

SEQ ID NO: 10424 - protein, 11 aa, synthetic construct
  REGION 1..11: note = short peptide
TDKTPALISDY

SEQ ID NO: 10425 - protein, 8 aa, synthetic construct
  REGION 1..8: note = short peptide
HQDISLLY

SEQ ID NO: 10426 - protein, 9 aa, synthetic construct
  REGION 1..9: note = short peptide
HNSALLQIH

SEQ ID NO: 10427 - protein, 8 aa, synthetic construct
  REGION 1..8: note = short peptide
HNSTMYVF

SEQ ID NO: 10428 - protein, 10 aa, synthetic construct
  REGION 1..10: note = short peptide
HHNETVSQQI

SEQ ID NO: 10429 - protein, 10 aa, synthetic construct
  REGION 1..10: note = short peptide
YYNITLAKRY

SEQ ID NO: 10430 - protein, 10 aa, synthetic construct
  REGION 1..10: note = short peptide
KSNDTAASEY

SEQ ID NO: 10431 - protein, 11 aa, synthetic construct
  REGION 1..11: note = short peptide
VVFNQSNIHEY

SEQ ID NO: 10432 - protein, 12 aa, synthetic construct
  REGION 1..12: note = short peptide
GRSPATGPSGAQ

SEQ ID NO: 10433 - protein, 13 aa, synthetic construct
  REGION 1..13: note = short peptide
KRKIVLDPSGSMN

SEQ ID NO: 10434 - protein, 8 aa, synthetic construct
  REGION 1..8: note = short peptide
TVSRQPSL

SEQ ID NO: 10435 - protein, 9 aa, synthetic construct
  REGION 1..9: note = short peptide
TVNLTNDRY

SEQ ID NO: 10436 - protein, 10 aa, synthetic construct
  REGION 1..10: note = short peptide
NPRNFSDNQL

SEQ ID NO: 10437 - protein, 9 aa, synthetic construct
  REGION 1..9: note = short peptide
KNRQLQGLK

SEQ ID NO: 10438 - protein, 9 aa, synthetic construct
  REGION 1..9: note = short peptide
ITQGTPLKY

SEQ ID NO: 10439 - protein, 9 aa, synthetic construct
  REGION 1..9: note = short peptide
TPQSNRPVM

SEQ ID NO: 10440 - protein, 11 aa, synthetic construct
  REGION 1..11: note = short peptide
ASPRGSSSASL

SEQ ID NO: 10441 - protein, 9 aa, synthetic construct
  REGION 1..9: note = short peptide
TSNDSAIYI

SEQ ID NO: 10442 - protein, 12 aa, synthetic construct
  REGION 1..12: note = short peptide
LTEVEKNATALY

SEQ ID NO: 10443 - protein, 10 aa, synthetic construct
  REGION 1..10: note = short peptide
AQHLNGSAAF

SEQ ID NO: 10444 - protein, 8 aa, synthetic construct
  REGION 1..8: note = short peptide
PHRLNSHL

SEQ ID NO: 10445 - protein, 8 aa, synthetic construct
  REGION 1..8: note = short peptide
FDTEAGAV

SEQ ID NO: 10446 - protein, 10 aa, synthetic construct
  REGION 1..10: note = short peptide
KPKPPKNESL

SEQ ID NO: 10447 - protein, 8 aa, synthetic construct
  REGION 1..8: note = short peptide
KYSVMINK

SEQ ID NO: 10448 - protein, 13 aa, synthetic construct
  REGION 1..13: note = short peptide
LPFGCTKEEIVQF

SEQ ID NO: 10449 - protein, 10 aa, synthetic construct
  REGION 1..10: note = short peptide
NHICDAKYHL

SEQ ID NO: 10450 - protein, 9 aa, synthetic construct
  REGION 1..9: note = short peptide
NHCRQMIMI

SEQ ID NO: 10451 - protein, 9 aa, synthetic construct
  REGION 1..9: note = short peptide
SFHNFTLCY

SEQ ID NO: 10452 - protein, 10 aa, synthetic construct
  REGION 1..10: note = short peptide
SHCQKTDLKL

SEQ ID NO: 10453 - protein, 9 aa, synthetic construct
  REGION 1..9: note = short peptide
HHIEPFCKL

SEQ ID NO: 10454 - protein, 12 aa, synthetic construct
  REGION 1..12: note = short peptide
VPAQVHVNGGAL

SEQ ID NO: 10455 - protein, 10 aa, synthetic construct
  REGION 1..10: note = short peptide
KPCNSQPSEL

SEQ ID NO: 10456 - protein, 10 aa, synthetic construct
  REGION 1..10: note = short peptide
THVEAECPFL

SEQ ID NO: 10457 - protein, 9 aa, synthetic construct
  REGION 1..9: note = short peptide
TICHILNLY

SEQ ID NO: 10458 - protein, 10 aa, synthetic construct
  REGION 1..10: note = short peptide
HHDGVSKANF

SEQ ID NO: 10459 - protein, 10 aa, synthetic construct
  REGION 1..10: note = short peptide
HHDGVSKANF

SEQ ID NO: 10460 - protein, 9 aa, synthetic construct
  REGION 1..9: note = short peptide
RPTIHLCEI

SEQ ID NO: 10461 - protein, 9 aa, synthetic construct
  REGION 1..9: note = short peptide
THHLLIQCF

SEQ ID NO: 10462 - protein, 9 aa, synthetic construct
  REGION 1..9: note = short peptide
SHYTCEVTW

SEQ ID NO: 10463 - protein, 10 aa, synthetic construct
  REGION 1..10: note = short peptide
IHSCQFGNFL

SEQ ID NO: 10464 - protein, 9 aa, synthetic construct
  REGION 1..9: note = short peptide
VHNIEESCF

SEQ ID NO: 10465 - protein, 9 aa, synthetic construct
  REGION 1..9: note = short peptide
SHCQLVTLI

SEQ ID NO: 10466 - protein, 9 aa, synthetic construct
  REGION 1..9: note = short peptide
SHCSQLTTL

SEQ ID NO: 10467 - protein, 9 aa, synthetic construct
  REGION 1..9: note = short peptide
TLDECGLRY

SEQ ID NO: 10468 - protein, 9 aa, synthetic construct
  REGION 1..9: note = short peptide
KLKESYCQR

SEQ ID NO: 10469 - protein, 10 aa, synthetic construct
  REGION 1..10: note = short peptide
THCTYDRVVL

SEQ ID NO: 10470 - protein, 10 aa, synthetic construct
  REGION 1..10: note = short peptide
HHAHCLHQAF

SEQ ID NO: 10471 - protein, 9 aa, synthetic construct
  REGION 1..9: note = short peptide
IQRILEHCL

SEQ ID NO: 10472 - protein, 9 aa, synthetic construct
  REGION 1..9: note = short peptide
RVRDGFCFR

SEQ ID NO: 10473 - protein, 9 aa, synthetic construct
  REGION 1..9: note = short peptide
THDGTCNNL

SEQ ID NO: 10474 - protein, 9 aa, synthetic construct
  REGION 1..9: note = short peptide
STKPPICQR

SEQ ID NO: 10475 - protein, 9 aa, synthetic construct
  REGION 1..9: note = short peptide
STLRDFCGR

SEQ ID NO: 10476 - protein, 9 aa, synthetic construct
  REGION 1..9: note = short peptide
SVACPGAQK

SEQ ID NO: 10477 - protein, 9 aa, synthetic construct
  REGION 1..9: note = short peptide
AHVESTCLL

SEQ ID NO: 10478 - protein, 9 aa, synthetic construct
  REGION 1..9: note = short peptide
VHDCVNITI

SEQ ID NO: 10479 - protein, 9 aa, synthetic construct
  REGION 1..9: note = short peptide
DHCRQMIMI

SEQ ID NO: 10480 - protein, 9 aa, synthetic construct
  REGION 1..9: note = short peptide
EHIKACEAF

SEQ ID NO: 10481 - protein, 9 aa, synthetic construct
  REGION 1..9: note = short peptide
VTFCGHTSK

SEQ ID NO: 10482 - protein, 9 aa, synthetic construct
  REGION 1..9: note = short peptide
NHSGPGPCI

SEQ ID NO: 10483 - protein, 8 aa, synthetic construct
  REGION 1..8: note = short peptide
HQDISLLY

SEQ ID NO: 10484 - protein, 9 aa, synthetic construct
  REGION 1..9: note = short peptide
NHCRQMIMI

SEQ ID NO: 10485 - protein, 9 aa, synthetic construct
  REGION 1..9: note = short peptide
NHCRQMIMI

SEQ ID NO: 10486 - protein, 9 aa, synthetic construct
  REGION 1..9: note = short peptide
SFHNFTLCY

SEQ ID NO: 10487 - protein, 9 aa, synthetic construct
  REGION 1..9: note = short peptide
SFHNFTLCY

SEQ ID NO: 10488 - protein, 11 aa, synthetic construct
  REGION 1..11: note = short peptide
QPRPGLRPTGL

SEQ ID NO: 10489 - protein, 8 aa, synthetic construct
  REGION 1..8: note = short peptide
HNDTKVVF

SEQ ID NO: 10490 - protein, 9 aa, synthetic construct
  REGION 1..9: note = short peptide
NQRNANISY

SEQ ID NO: 10491 - protein, 9 aa, synthetic construct
  REGION 1..9: note = short peptide
LRHGNDQRV

SEQ ID NO: 10492 - protein, 9 aa, synthetic construct
  REGION 1..9: note = short peptide
LLGRTGSGK

SEQ ID NO: 10493 - protein, 9 aa, synthetic construct
  REGION 1..9: note = short peptide
KLHNGTIQR

SEQ ID NO: 10494 - protein, 9 aa, synthetic construct
  REGION 1..9: note = short peptide
KVYNSTLTW

SEQ ID NO: 10495 - protein, 10 aa, synthetic construct
  REGION 1..10: note = short peptide
KVWSDPFGRK

SEQ ID NO: 10496 - protein, 15 aa, synthetic construct
  REGION 1..15: note = short peptide
MEAAGSPAATETGKY

SEQ ID NO: 10497 - protein, 9 aa, synthetic construct
  REGION 1..9: note = short peptide
KAYNQTHLY

SEQ ID NO: 10498 - protein, 12 aa, synthetic construct
  REGION 1..12: note = short peptide
HPGVAGNAPLGL

SEQ ID NO: 10499 - protein, 8 aa, synthetic construct
  REGION 1..8: note = short peptide
LVRAKDSI

SEQ ID NO: 10500 - protein, 9 aa, synthetic construct
  REGION 1..9: note = short peptide
GQSSPQRSY

SEQ ID NO: 10501 - protein, 9 aa, synthetic construct
  REGION 1..9: note = short peptide
YPGPRPQSL

SEQ ID NO: 10502 - protein, 9 aa, synthetic construct
  REGION 1..9: note = short peptide
SHWHPNITI

SEQ ID NO: 10503 - protein, 9 aa, synthetic construct
  REGION 1..9: note = short peptide
KSSKIMDSF

SEQ ID NO: 10504 - protein, 10 aa, synthetic construct
  REGION 1..10: note = short peptide
DLVNRSIAQM

SEQ ID NO: 10505 - protein, 10 aa, synthetic construct
  REGION 1..10: note = short peptide
GEDVETSKKW

SEQ ID NO: 10506 - protein, 9 aa, synthetic construct
  REGION 1..9: note = short peptide
SVYVYKVLK

SEQ ID NO: 10507 - protein, 10 aa, synthetic construct
  REGION 1..10: note = short peptide
GARKNLSERW

SEQ ID NO: 10508 - protein, 9 aa, synthetic construct
  REGION 1..9: note = short peptide
RYHNQTLRY

SEQ ID NO: 10509 - protein, 8 aa, synthetic construct
  REGION 1..8: note = short peptide
TDQQKLIY

SEQ ID NO: 10510 - protein, 9 aa, synthetic construct
  REGION 1..9: note = short peptide
FHSHDGPSL

SEQ ID NO: 10511 - protein, 8 aa, synthetic construct
  REGION 1..8: note = short peptide
SPSKSPSL

SEQ ID NO: 10512 - protein, 11 aa, synthetic construct
  REGION 1..11: note = short peptide
RPAGAAGPEPK

SEQ ID NO: 10513 - protein, 10 aa, synthetic construct
  REGION 1..10: note = short peptide
HDPNTHHCLC

SEQ ID NO: 10514 - protein, 9 aa, synthetic construct
  REGION 1..9: note = short peptide
RSGGPRPAL

SEQ ID NO: 10515 - protein, 14 aa, synthetic construct
  REGION 1..14: note = short peptide
ASTSTTIRSHSSSR

SEQ ID NO: 10516 - protein, 9 aa, synthetic construct
  REGION 1..9: note = short peptide
APRPPSSGL

SEQ ID NO: 10517 - protein, 9 aa, synthetic construct
  REGION 1..9: note = short peptide
TRDALHLGF

SEQ ID NO: 10518 - protein, 9 aa, synthetic construct
  REGION 1..9: note = short peptide
YHVAVVCYL

SEQ ID NO: 10519 - protein, 9 aa, synthetic construct
  REGION 1..9: note = short peptide
AHSCLSDRL

SEQ ID NO: 10520 - protein, 9 aa, synthetic construct
  REGION 1..9: note = short peptide
KMLDCSPIL

SEQ ID NO: 10521 - protein, 9 aa, synthetic construct
  REGION 1..9: note = short peptide
SSDICRSIY

SEQ ID NO: 10522 - protein, 10 aa, synthetic construct
  REGION 1..10: note = short peptide
RSYCRALERL

SEQ ID NO: 10523 - protein, 11 aa, synthetic construct
  REGION 1..11: note = short peptide
NPVSINCGHSY

SEQ ID NO: 10524 - protein, 8 aa, synthetic construct
  REGION 1..8: note = short peptide
TPLCKEVL

SEQ ID NO: 10525 - protein, 9 aa, synthetic construct
  REGION 1..9: note = short peptide
HHARSICHL

SEQ ID NO: 10526 - protein, 9 aa, synthetic construct
  REGION 1..9: note = short peptide
RLAPCFRDK

SEQ ID NO: 10527 - protein, 13 aa, synthetic construct
  REGION 1..13: note = short peptide
VTEQPRGQDHCFY

SEQ ID NO: 10528 - protein, 9 aa, synthetic construct
  REGION 1..9: note = short peptide
DVQKKNCSL

SEQ ID NO: 10529 - protein, 9 aa, synthetic construct
  REGION 1..9: note = short peptide
NHIKSSCSL

SEQ ID NO: 10530 - protein, 9 aa, synthetic construct
  REGION 1..9: note = short peptide
CTDKANILY

SEQ ID NO: 10531 - protein, 10 aa, synthetic construct
  REGION 1..10: note = short peptide
SPIFPGGACL

SEQ ID NO: 10532 - protein, 9 aa, synthetic construct
  REGION 1..9: note = short peptide
GHALCLQKL

SEQ ID NO: 10533 - protein, 9 aa, synthetic construct
  REGION 1..9: note = short peptide
KVRCSRYLY

SEQ ID NO: 10534 - protein, 9 aa, synthetic construct
  REGION 1..9: note = short peptide
QHGEEECKF

SEQ ID NO: 10535 - protein, 9 aa, synthetic construct
  REGION 1..9: note = short peptide
DHNGGQKQL

SEQ ID NO: 10536 - protein, 11 aa, synthetic construct
  REGION 1..11: note = short peptide
ATCRGSPWMLK

SEQ ID NO: 10537 - protein, 10 aa, synthetic construct
  REGION 1..10: note = short peptide
GQPVKNDQCY

SEQ ID NO: 10538 - protein, 10 aa, synthetic construct
  REGION 1..10: note = short peptide
THEKPCNTSF

SEQ ID NO: 10539 - protein, 10 aa, synthetic construct
  REGION 1..10: note = short peptide
KGKYGCVDYW

SEQ ID NO: 10540 - protein, 9 aa, synthetic construct
  REGION 1..9: note = short peptide
THDGTCNNL

SEQ ID NO: 10541 - protein, 9 aa, synthetic construct
  REGION 1..9: note = short peptide
THLCDEVSL

SEQ ID NO: 10542 - protein, 10 aa, synthetic construct
  REGION 1..10: note = short peptide
KTNAKLYCNR

SEQ ID NO: 10543 - protein, 9 aa, synthetic construct
  REGION 1..9: note = short peptide
TLDECGLRY

SEQ ID NO: 10544 - protein, 10 aa, synthetic construct
  REGION 1..10: note = short peptide
HEAVTIKCTF

SEQ ID NO: 10545 - protein, 10 aa, synthetic construct
  REGION 1..10: note = short peptide
KVWSDPFGRK

SEQ ID NO: 10546 - protein, 10 aa, synthetic construct
  REGION 1..10: note = short peptide
GEDVETSKKW

SEQ ID NO: 10547 - protein, 8 aa, synthetic construct
  REGION 1..8: note = short peptide
TDQQKLIY

SEQ ID NO: 10548 - protein, 9 aa, synthetic construct
  REGION 1..9: note = short peptide
KYIEKVSSR

SEQ ID NO: 10549 - protein, 10 aa, synthetic construct
  REGION 1..10: note = short peptide
KPRLQPGGAL

SEQ ID NO: 10550 - protein, 9 aa, synthetic construct
  REGION 1..9: note = short peptide
KFAEWCLDY

SEQ ID NO: 10551 - protein, 9 aa, synthetic construct
  REGION 1..9: note = short peptide
KGADHTQAI

SEQ ID NO: 10552 - protein, 11 aa, synthetic construct
  REGION 1..11: note = short peptide
APSSARASPLL

SEQ ID NO: 10553 - protein, 9 aa, synthetic construct
  REGION 1..9: note = short peptide
TQKNKATEY

SEQ ID NO: 10554 - protein, 12 aa, synthetic construct
  REGION 1..12: note = short peptide
TPRLASTNSSVL

SEQ ID NO: 10555 - protein, 9 aa, synthetic construct
  REGION 1..9: note = short peptide
MPFFPTPRY

SEQ ID NO: 10556 - protein, 9 aa, synthetic construct
  REGION 1..9: note = short peptide
LHNVTAELF

SEQ ID NO: 10557 - protein, 9 aa, synthetic construct
  REGION 1..9: note = short peptide
DPNTHHCLC

SEQ ID NO: 10558 - protein, 10 aa, synthetic construct
  REGION 1..10: note = short peptide
DRPSREAPPW

SEQ ID NO: 10559 - protein, 8 aa, synthetic construct
  REGION 1..8: note = short peptide
DAARKEAL

SEQ ID NO: 10560 - protein, 9 aa, synthetic construct
  REGION 1..9: note = short peptide
HTVNHTYVL

SEQ ID NO: 10561 - protein, 11 aa, synthetic construct
  REGION 1..11: note = short peptide
QRNTTDTLITL

SEQ ID NO: 10562 - protein, 8 aa, synthetic construct
  REGION 1..8: note = short peptide
RTGKRTSR

SEQ ID NO: 10563 - protein, 10 aa, synthetic construct
  REGION 1..10: note = short peptide
HSINITRVYR

SEQ ID NO: 10564 - protein, 11 aa, synthetic construct
  REGION 1..11: note = short peptide
QSLPDLSLLPN

SEQ ID NO: 10565 - protein, 10 aa, synthetic construct
  REGION 1..10: note = short peptide
WPDDLQNHTF

SEQ ID NO: 10566 - protein, 10 aa, synthetic construct
  REGION 1..10: note = short peptide
GEDVETSKKW

SEQ ID NO: 10567 - protein, 11 aa, synthetic construct
  REGION 1..11: note = short peptide
IHNNSATSALW

SEQ ID NO: 10568 - protein, 10 aa, synthetic construct
  REGION 1..10: note = short peptide
GIMGPSGAGK

SEQ ID NO: 10569 - protein, 12 aa, synthetic construct
  REGION 1..12: note = short peptide
RSRGGGGGGFHR

SEQ ID NO: 10570 - protein, 9 aa, synthetic construct
  REGION 1..9: note = short peptide
HLNGTASQK

SEQ ID NO: 10571 - protein, 11 aa, synthetic construct
  REGION 1..11: note = short peptide
RGRGGGGGFQR

SEQ ID NO: 10572 - protein, 9 aa, synthetic construct
  REGION 1..9: note = short peptide
RGRGGFQGR

SEQ ID NO: 10573 - protein, 9 aa, synthetic construct
  REGION 1..9: note = short peptide
RSGLPRGPR

SEQ ID NO: 10574 - protein, 8 aa, synthetic construct
  REGION 1..8: note = short peptide
GSSSPLRK

SEQ ID NO: 10575 - protein, 9 aa, synthetic construct
  REGION 1..9: note = short peptide
FQRNNKTVF

SEQ ID NO: 10576 - protein, 11 aa, synthetic construct
  REGION 1..11: note = short peptide
VPRGPTATARF

SEQ ID NO: 10577 - protein, 9 aa, synthetic construct
  REGION 1..9: note = short peptide
FPRPGGPMA

SEQ ID NO: 10578 - protein, 9 aa, synthetic construct
  REGION 1..9: note = short peptide
SHISNMSYI

SEQ ID NO: 10579 - protein, 9 aa, synthetic construct
  REGION 1..9: note = short peptide
FPREPRPKL

SEQ ID NO: 10580 - protein, 10 aa, synthetic construct
  REGION 1..10: note = short peptide
PPSPLLPSLL

SEQ ID NO: 10581 - protein, 10 aa, synthetic construct
  REGION 1..10: note = short peptide
FHYNGTDVSF

SEQ ID NO: 10582 - protein, 9 aa, synthetic construct
  REGION 1..9: note = short peptide
IRNRTDLRF

SEQ ID NO: 10583 - protein, 10 aa, synthetic construct
  REGION 1..10: note = short peptide
KAKQGYVIYR

SEQ ID NO: 10584 - protein, 10 aa, synthetic construct
  REGION 1..10: note = short peptide
NHSGPGPCIC

SEQ ID NO: 10585 - protein, 11 aa, synthetic construct
  REGION 1..11: note = short peptide
SGFICISGLCL

SEQ ID NO: 10586 - protein, 9 aa, synthetic construct
  REGION 1..9: note = short peptide
VVAAVMCRR

SEQ ID NO: 10587 - protein, 9 aa, synthetic construct
  REGION 1..9: note = short peptide
AEGCHTHHF

SEQ ID NO: 10588 - protein, 9 aa, synthetic construct
  REGION 1..9: note = short peptide
KHCEDPVVI

SEQ ID NO: 10589 - protein, 9 aa, synthetic construct
  REGION 1..9: note = short peptide
RRLQLPRLR

SEQ ID NO: 10590 - protein, 10 aa, synthetic construct
  REGION 1..10: note = short peptide
THDCGYEELL

SEQ ID NO: 10591 - protein, 10 aa, synthetic construct
  REGION 1..10: note = short peptide
TPIEGKNMSF

SEQ ID NO: 10592 - protein, 9 aa, synthetic construct
  REGION 1..9: note = short peptide
RSSCPHVLK

SEQ ID NO: 10593 - protein, 9 aa, synthetic construct
  REGION 1..9: note = short peptide
SQHVNGGVM

SEQ ID NO: 10594 - protein, 10 aa, synthetic construct
  REGION 1..10: note = short peptide
CSDEASGCHY

SEQ ID NO: 10595 - protein, 10 aa, synthetic construct
  REGION 1..10: note = short peptide
EHVAAECSTW

SEQ ID NO: 10596 - protein, 9 aa, synthetic construct
  REGION 1..9: note = short peptide
RFICIYPAY

SEQ ID NO: 10597 - protein, 9 aa, synthetic construct
  REGION 1..9: note = short peptide
TRCGCVTML

SEQ ID NO: 10598 - protein, 9 aa, synthetic construct
  REGION 1..9: note = short peptide
NETFLCHRF

SEQ ID NO: 10599 - protein, 9 aa, synthetic construct
  REGION 1..9: note = short peptide
TQCGYDVRI

SEQ ID NO: 10600 - protein, 9 aa, synthetic construct
  REGION 1..9: note = short peptide
RVQIHANCR

SEQ ID NO: 10601 - protein, 10 aa, synthetic construct
  REGION 1..10: note = short peptide
AVCELGGYLY

SEQ ID NO: 10602 - protein, 10 aa, synthetic construct
  REGION 1..10: note = short peptide
HQNGNKHCVF

SEQ ID NO: 10603 - protein, 9 aa, synthetic construct
  REGION 1..9: note = short peptide
KQKCETQTL

SEQ ID NO: 10604 - protein, 9 aa, synthetic construct
  REGION 1..9: note = short peptide
SHCIAILKI

SEQ ID NO: 10605 - protein, 9 aa, synthetic construct
  REGION 1..9: note = short peptide
RVRNGFLMR

SEQ ID NO: 10606 - protein, 9 aa, synthetic construct
  REGION 1..9: note = short peptide
VADQLCAKY

SEQ ID NO: 10607 - protein, 9 aa, synthetic construct
  REGION 1..9: note = short peptide
SQPKKFCDY

SEQ ID NO: 10608 - protein, 9 aa, synthetic construct
  REGION 1..9: note = short peptide
VTRCGFATR

SEQ ID NO: 10609 - protein, 9 aa, synthetic construct
  REGION 1..9: note = short peptide
VTKNDGHYR

SEQ ID NO: 10610 - protein, 8 aa, synthetic construct
  REGION 1..8: note = short peptide
EHGPTHCL

SEQ ID NO: 10611 - protein, 9 aa, synthetic construct
  REGION 1..9: note = short peptide
YHGDGMVCL

SEQ ID NO: 10612 - protein, 9 aa, synthetic construct
  REGION 1..9: note = short peptide
KFAEWCLDY

SEQ ID NO: 10613 - protein, 10 aa, synthetic construct
  REGION 1..10: note = short peptide
GEDVETSKKW

SEQ ID NO: 10614 - protein, 11 aa, synthetic construct
  REGION 1..11: note = short peptide
SGFICISGLCL

SEQ ID NO: 10615 - protein, 12 aa, synthetic construct
  REGION 1..12: note = short peptide
KTKGGSKYLIYR

SEQ ID NO: 10616 - protein, 8 aa, synthetic construct
  REGION 1..8: note = short peptide
KTKRVSTK

SEQ ID NO: 10617 - protein, 8 aa, synthetic construct
  REGION 1..8: note = short peptide
KTDGKKSY

SEQ ID NO: 10618 - protein, 11 aa, synthetic construct
  REGION 1..11: note = short peptide
VPRGPTATARF

SEQ ID NO: 10619 - protein, 9 aa, synthetic construct
  REGION 1..9: note = short peptide
YGGQTKPIF

SEQ ID NO: 10620 - protein, 10 aa, synthetic construct
  REGION 1..10: note = short peptide
YFEYIEENKY

SEQ ID NO: 10621 - protein, 8 aa, synthetic construct
  REGION 1..8: note = short peptide
LHALNVTW

SEQ ID NO: 10622 - protein, 11 aa, synthetic construct
  REGION 1..11: note = short peptide
VHDPNHSKMRL

SEQ ID NO: 10623 - protein, 9 aa, synthetic construct
  REGION 1..9: note = short peptide
LPVKNGTRY

SEQ ID NO: 10624 - protein, 8 aa, synthetic construct
  REGION 1..8: note = short peptide
SAHFSRPV

SEQ ID NO: 10625 - protein, 9 aa, synthetic construct
  REGION 1..9: note = short peptide
SAKDLKNML

SEQ ID NO: 10626 - protein, 9 aa, synthetic construct
  REGION 1..9: note = short peptide
NHNKTLQLL

SEQ ID NO: 10627 - protein, 9 aa, synthetic construct
  REGION 1..9: note = short peptide
LPVRPQTNA

SEQ ID NO: 10628 - protein, 9 aa, synthetic construct
  REGION 1..9: note = short peptide
RGGGPIRNR

SEQ ID NO: 10629 - protein, 9 aa, synthetic construct
  REGION 1..9: note = short peptide
RGGGPIRNR

SEQ ID NO: 10630 - protein, 12 aa, synthetic construct
  REGION 1..12: note = short peptide
RGDSTFESKSYK

SEQ ID NO: 10631 - protein, 9 aa, synthetic construct
  REGION 1..9: note = short peptide
RPIIATNTY

SEQ ID NO: 10632 - protein, 12 aa, synthetic construct
  REGION 1..12: note = short peptide
QPVNLSSLAQKY

SEQ ID NO: 10633 - protein, 8 aa, synthetic construct
  REGION 1..8: note = short peptide
QHEKKYDI

SEQ ID NO: 10634 - protein, 10 aa, synthetic construct
  REGION 1..10: note = short peptide
RYQQFKDFQR

SEQ ID NO: 10635 - protein, 12 aa, synthetic construct
  REGION 1..12: note = short peptide
RSRGGGGGGFHR

SEQ ID NO: 10636 - protein, 11 aa, synthetic construct
  REGION 1..11: note = short peptide
RSRSPITTNHR

SEQ ID NO: 10637 - protein, 10 aa, synthetic construct
  REGION 1..10: note = short peptide
TKLPNSVLGR

SEQ ID NO: 10638 - protein, 9 aa, synthetic construct
  REGION 1..9: note = short peptide
SSDPQAQKY

SEQ ID NO: 10639 - protein, 12 aa, synthetic construct
  REGION 1..12: note = short peptide
SPVENPDNYCFC

SEQ ID NO: 10640 - protein, 10 aa, synthetic construct
  REGION 1..10: note = short peptide
MPSKLHIVDL

SEQ ID NO: 10641 - protein, 10 aa, synthetic construct
  REGION 1..10: note = short peptide
KSSDTALPPP

SEQ ID NO: 10642 - protein, 9 aa, synthetic construct
  REGION 1..9: note = short peptide
GTIGKKFAR

SEQ ID NO: 10643 - protein, 8 aa, synthetic construct
  REGION 1..8: note = short peptide
HLHKLKRA

SEQ ID NO: 10644 - protein, 9 aa, synthetic construct
  REGION 1..9: note = short peptide
HVAPSVGTL

SEQ ID NO: 10645 - protein, 9 aa, synthetic construct
  REGION 1..9: note = short peptide
HTETKTITY

SEQ ID NO: 10646 - protein, 9 aa, synthetic construct
  REGION 1..9: note = short peptide
HTDILKEKY

SEQ ID NO: 10647 - protein, 9 aa, synthetic construct
  REGION 1..9: note = short peptide
HQKGQNGSF

SEQ ID NO: 10648 - protein, 9 aa, synthetic construct
  REGION 1..9: note = short peptide
HNDTKVVFL

SEQ ID NO: 10649 - protein, 10 aa, synthetic construct
  REGION 1..10: note = short peptide
GQPRPPILGY

SEQ ID NO: 10650 - protein, 9 aa, synthetic construct
  REGION 1..9: note = short peptide
KLDLKVHSL

SEQ ID NO: 10651 - protein, 8 aa, synthetic construct
  REGION 1..8: note = short peptide
KKDVTLSK

SEQ ID NO: 10652 - protein, 9 aa, synthetic construct
  REGION 1..9: note = short peptide
APRTNGVAM

SEQ ID NO: 10653 - protein, 13 aa, synthetic construct
  REGION 1..13: note = short peptide
ANKGPSYGMSREV

SEQ ID NO: 10654 - protein, 11 aa, synthetic construct
  REGION 1..11: note = short peptide
AMKNSTKEFVR

SEQ ID NO: 10655 - protein, 12 aa, synthetic construct
  REGION 1..12: note = short peptide
ALPPALLRPAPG

SEQ ID NO: 10656 - protein, 9 aa, synthetic construct
  REGION 1..9: note = short peptide
AHNTTLTEI

SEQ ID NO: 10657 - protein, 8 aa, synthetic construct
  REGION 1..8: note = short peptide
AGDDAPKR

SEQ ID NO: 10658 - protein, 9 aa, synthetic construct
  REGION 1..9: note = short peptide
FFNYTVRTL

SEQ ID NO: 10659 - protein, 9 aa, synthetic construct
  REGION 1..9: note = short peptide
FGLRLDSRW

SEQ ID NO: 10660 - protein, 10 aa, synthetic construct
  REGION 1..10: note = short peptide
EERKTAELQK

SEQ ID NO: 10661 - protein, 9 aa, synthetic construct
  REGION 1..9: note = short peptide
KSKTPLVAR

SEQ ID NO: 10662 - protein, 11 aa, synthetic construct
  REGION 1..11: note = short peptide
KPRAGAANSQL

SEQ ID NO: 10663 - protein, 9 aa, synthetic construct
  REGION 1..9: note = short peptide
YSCLDAQFY

SEQ ID NO: 10664 - protein, 10 aa, synthetic construct
  REGION 1..10: note = short peptide
KTNMEKLTFY

SEQ ID NO: 10665 - protein, 9 aa, synthetic construct
  REGION 1..9: note = short peptide
KAQECFQER

SEQ ID NO: 10666 - protein, 10 aa, synthetic construct
  REGION 1..10: note = short peptide
KKDSKNDNFK

SEQ ID NO: 10667 - protein, 9 aa, synthetic construct
  REGION 1..9: note = short peptide
LTCIAVDRY

SEQ ID NO: 10668 - protein, 10 aa, synthetic construct
  REGION 1..10: note = short peptide
THDCGYEELL

SEQ ID NO: 10669 - protein, 9 aa, synthetic construct
  REGION 1..9: note = short peptide
KHNNDTQHI

SEQ ID NO: 10670 - protein, 8 aa, synthetic construct
  REGION 1..8: note = short peptide
QAHAQVTW

SEQ ID NO: 10671 - protein, 9 aa, synthetic construct
  REGION 1..9: note = short peptide
EEAALNKCY

SEQ ID NO: 10672 - protein, 11 aa, synthetic construct
  REGION 1..11: note = short peptide
QHYEDASCGLL

SEQ ID NO: 10673 - protein, 10 aa, synthetic construct
  REGION 1..10: note = short peptide
RECEVLKKIW

SEQ ID NO: 10674 - protein, 10 aa, synthetic construct
  REGION 1..10: note = short peptide
FTNSNTPNSY

SEQ ID NO: 10675 - protein, 9 aa, synthetic construct
  REGION 1..9: note = short peptide
RSASPHCLK

SEQ ID NO: 10676 - protein, 9 aa, synthetic construct
  REGION 1..9: note = short peptide
NHADCHDLL

SEQ ID NO: 10677 - protein, 8 aa, synthetic construct
  REGION 1..8: note = short peptide
NHSLDVSF

SEQ ID NO: 10678 - protein, 9 aa, synthetic construct
  REGION 1..9: note = short peptide
TRCHIRFTF

SEQ ID NO: 10679 - protein, 8 aa, synthetic construct
  REGION 1..8: note = short peptide
EHGPTHCL

SEQ ID NO: 10680 - protein, 9 aa, synthetic construct
  REGION 1..9: note = short peptide
VHSVENMNF

SEQ ID NO: 10681 - protein, 9 aa, synthetic construct
  REGION 1..9: note = short peptide
NTCYKHFYY

SEQ ID NO: 10682 - protein, 9 aa, synthetic construct
  REGION 1..9: note = short peptide
THDCGYEEL

SEQ ID NO: 10683 - protein, 11 aa, synthetic construct
  REGION 1..11: note = short peptide
KLKECVSILPR

SEQ ID NO: 10684 - protein, 9 aa, synthetic construct
  REGION 1..9: note = short peptide
THDCGYEEL

SEQ ID NO: 10685 - protein, 9 aa, synthetic construct
  REGION 1..9: note = short peptide
KEKLCYVGY

SEQ ID NO: 10686 - protein, 9 aa, synthetic construct
  REGION 1..9: note = short peptide
AVYPVRSAY

SEQ ID NO: 10687 - protein, 12 aa, synthetic construct
  REGION 1..12: note = short peptide
GYFGQGRGGGGY

SEQ ID NO: 10688 - protein, 11 aa, synthetic construct
  REGION 1..11: note = short peptide
AVKSNGSVFVR

SEQ ID NO: 10689 - protein, 15 aa, synthetic construct
  REGION 1..15: note = short peptide
HGSDSVESAEKEIGL

SEQ ID NO: 10690 - protein, 13 aa, synthetic construct
  REGION 1..13: note = short peptide
GPRQPASGQGVGM

SEQ ID NO: 10691 - protein, 15 aa, synthetic construct
  REGION 1..15: note = short peptide
TGDAYVILKTVQLRN

SEQ ID NO: 10692 - protein, 11 aa, synthetic construct
  REGION 1..11: note = short peptide
CGNVYCGVHRY

SEQ ID NO: 10693 - protein, 14 aa, synthetic construct
  REGION 1..14: note = short peptide
TSPAKQQAPPVRNL

SEQ ID NO: 10694 - protein, 8 aa, synthetic construct
  REGION 1..8: note = short peptide
QSEASSKD

SEQ ID NO: 10695 - protein, 9 aa, synthetic construct
  REGION 1..9: note = short peptide
RAQLPKYQR

SEQ ID NO: 10696 - protein, 9 aa, synthetic construct
  REGION 1..9: note = short peptide
RAHGRINPY

SEQ ID NO: 10697 - protein, 10 aa, synthetic construct
  REGION 1..10: note = short peptide
TSFKNSTKSW

SEQ ID NO: 10698 - protein, 9 aa, synthetic construct
  REGION 1..9: note = short peptide
IEHGIVTNW

SEQ ID NO: 10699 - protein, 8 aa, synthetic construct
  REGION 1..8: note = short peptide
QAAPSPVL

SEQ ID NO: 10700 - protein, 11 aa, synthetic construct
  REGION 1..11: note = short peptide
RAYGGSMCAKC

SEQ ID NO: 10701 - protein, 13 aa, synthetic construct
  REGION 1..13: note = short peptide
STRSVSSSSYRRM

SEQ ID NO: 10702 - protein, 9 aa, synthetic construct
  REGION 1..9: note = short peptide
SHSQDIKSI

SEQ ID NO: 10703 - protein, 9 aa, synthetic construct
  REGION 1..9: note = short peptide
SPRTPNRSV

SEQ ID NO: 10704 - protein, 11 aa, synthetic construct
  REGION 1..11: note = short peptide
SRGGGGGGFHR

SEQ ID NO: 10705 - protein, 9 aa, synthetic construct
  REGION 1..9: note = short peptide
EAVSRGCAI

SEQ ID NO: 10706 - protein, 9 aa, synthetic construct
  REGION 1..9: note = short peptide
GGYRPVWNR

SEQ ID NO: 10707 - protein, 9 aa, synthetic construct
  REGION 1..9: note = short peptide
KVFGDGSRL

SEQ ID NO: 10708 - protein, 9 aa, synthetic construct
  REGION 1..9: note = short peptide
GPMQNATKY

SEQ ID NO: 10709 - protein, 11 aa, synthetic construct
  REGION 1..11: note = short peptide
IHHNETVSQQI

SEQ ID NO: 10710 - protein, 9 aa, synthetic construct
  REGION 1..9: note = short peptide
LVDCSTEKY

SEQ ID NO: 10711 - protein, 11 aa, synthetic construct
  REGION 1..11: note = short peptide
KKGQKGNPKGR

SEQ ID NO: 10712 - protein, 11 aa, synthetic construct
  REGION 1..11: note = short peptide
KIREANKLAEK

SEQ ID NO: 10713 - protein, 9 aa, synthetic construct
  REGION 1..9: note = short peptide
KGNLSFDWY

SEQ ID NO: 10714 - protein, 10 aa, synthetic construct
  REGION 1..10: note = short peptide
VPSASALIIK

SEQ ID NO: 10715 - protein, 9 aa, synthetic construct
  REGION 1..9: note = short peptide
KSKTPLVAR

SEQ ID NO: 10716 - protein, 11 aa, synthetic construct
  REGION 1..11: note = short peptide
PGKKPVSAFSK

SEQ ID NO: 10717 - protein, 8 aa, synthetic construct
  REGION 1..8: note = short peptide
KALADVVI

SEQ ID NO: 10718 - protein, 11 aa, synthetic construct
  REGION 1..11: note = short peptide
KMPKFSMPGFK

SEQ ID NO: 10719 - protein, 13 aa, synthetic construct
  REGION 1..13: note = short peptide
AAADPNAAWAAYY

SEQ ID NO: 10720 - protein, 9 aa, synthetic construct
  REGION 1..9: note = short peptide
TVKALISHL

SEQ ID NO: 10721 - protein, 13 aa, synthetic construct
  REGION 1..13: note = short peptide
AAAAAAAAAAAHL

SEQ ID NO: 10722 - protein, 9 aa, synthetic construct
  REGION 1..9: note = short peptide
SRCEYQIRL

SEQ ID NO: 10723 - protein, 10 aa, synthetic construct
  REGION 1..10: note = short peptide
RAKLFPHCGR

SEQ ID NO: 10724 - protein, 9 aa, synthetic construct
  REGION 1..9: note = short peptide
EHQQCLAVF

SEQ ID NO: 10725 - protein, 10 aa, synthetic construct
  REGION 1..10: note = short peptide
EELKSMQRCY

SEQ ID NO: 10726 - protein, 9 aa, synthetic construct
  REGION 1..9: note = short peptide
YLPRMCLQY

SEQ ID NO: 10727 - protein, 9 aa, synthetic construct
  REGION 1..9: note = short peptide
HAFCQAHSY

SEQ ID NO: 10728 - protein, 9 aa, synthetic construct
  REGION 1..9: note = short peptide
CGKPGHLAR

SEQ ID NO: 10729 - protein, 8 aa, synthetic construct
  REGION 1..8: note = short peptide
KPMTQRAL

SEQ ID NO: 10730 - protein, 9 aa, synthetic construct
  REGION 1..9: note = short peptide
KSDGCHILY

SEQ ID NO: 10731 - protein, 9 aa, synthetic construct
  REGION 1..9: note = short peptide
THDTRLFCL

SEQ ID NO: 10732 - protein, 9 aa, synthetic construct
  REGION 1..9: note = short peptide
DPVDQCVAY

SEQ ID NO: 10733 - protein, 9 aa, synthetic construct
  REGION 1..9: note = short peptide
SEMEGCRNL

SEQ ID NO: 10734 - protein, 9 aa, synthetic construct
  REGION 1..9: note = short peptide
RINNPACHK

SEQ ID NO: 10735 - protein, 10 aa, synthetic construct
  REGION 1..10: note = short peptide
KTIDTKTVCR

SEQ ID NO: 10736 - protein, 8 aa, synthetic construct
  REGION 1..8: note = short peptide
FAGTACEL

SEQ ID NO: 10737 - protein, 9 aa, synthetic construct
  REGION 1..9: note = short peptide
HLFQYPCSK

SEQ ID NO: 10738 - protein, 9 aa, synthetic construct
  REGION 1..9: note = short peptide
AESLAVHNI

SEQ ID NO: 10739 - protein, 12 aa, synthetic construct
  REGION 1..12: note = short peptide
APRNKSHIDTCL

SEQ ID NO: 10740 - protein, 15 aa, synthetic construct
  REGION 1..15: note = short peptide
TGDAYVILKTVQLRN

SEQ ID NO: 10741 - protein, 9 aa, synthetic construct
  REGION 1..9: note = short peptide
IEHGIVTNW

SEQ ID NO: 10742 - protein, 9 aa, synthetic construct
  REGION 1..9: note = short peptide
EAVSRGCAI

SEQ ID NO: 10743 - protein, 9 aa, synthetic construct
  REGION 1..9: note = short peptide
LVDCSTEKY

SEQ ID NO: 10744 - protein, 9 aa, synthetic construct
  REGION 1..9: note = short peptide
KGNLSFDWY

SEQ ID NO: 10745 - protein, 13 aa, synthetic construct
  REGION 1..13: note = short peptide
AAADPNAAWAAYY

SEQ ID NO: 10746 - protein, 9 aa, synthetic construct
  REGION 1..9: note = short peptide
TVKALISHL

SEQ ID NO: 10747 - protein, 8 aa, synthetic construct
  REGION 1..8: note = short peptide
CQICITYI

SEQ ID NO: 10748 - protein, 10 aa, synthetic construct
  REGION 1..10: note = short peptide
KLNQKRAELK

SEQ ID NO: 10749 - protein, 9 aa, synthetic construct
  REGION 1..9: note = short peptide
GDLCRICQM

SEQ ID NO: 10750 - protein, 8 aa, synthetic construct
  REGION 1..8: note = short peptide
TQELQQAK

SEQ ID NO: 10751 - protein, 9 aa, synthetic construct
  REGION 1..9: note = short peptide
QAMQFGQLL

SEQ ID NO: 10752 - protein, 10 aa, synthetic construct
  REGION 1..10: note = short peptide
QEIDFLQQLY

SEQ ID NO: 10753 - protein, 11 aa, synthetic construct
  REGION 1..11: note = short peptide
GELIIWDALDW

SEQ ID NO: 10754 - protein, 8 aa, synthetic construct
  REGION 1..8: note = short peptide
GYSNGVIN

SEQ ID NO: 10755 - protein, 11 aa, synthetic construct
  REGION 1..11: note = short peptide
QDCAVLQQSSL

SEQ ID NO: 10756 - protein, 10 aa, synthetic construct
  REGION 1..10: note = short peptide
KKLLQLKNFN

SEQ ID NO: 10757 - protein, 9 aa, synthetic construct
  REGION 1..9: note = short peptide
HQQAEVFIV

SEQ ID NO: 10758 - protein, 12 aa, synthetic construct
  REGION 1..12: note = short peptide
LPVSICRSCETL

SEQ ID NO: 10759 - protein, 11 aa, synthetic construct
  REGION 1..11: note = short peptide
LTECPEIEICY

SEQ ID NO: 10760 - protein, 10 aa, synthetic construct
  REGION 1..10: note = short peptide
DVIGDEICCW

SEQ ID NO: 10761 - protein, 11 aa, synthetic construct
  REGION 1..11: note = short peptide
TLQPGCGRPQV

SEQ ID NO: 10762 - protein, 9 aa, synthetic construct
  REGION 1..9: note = short peptide
THSHTCQCF

SEQ ID NO: 10763 - protein, 9 aa, synthetic construct
  REGION 1..9: note = short peptide
PYVCQVCQF

SEQ ID NO: 10764 - protein, 9 aa, synthetic construct
  REGION 1..9: note = short peptide
PQLPQSSQL

SEQ ID NO: 10765 - protein, 10 aa, synthetic construct
  REGION 1..10: note = short peptide
DVLGDEICCW

SEQ ID NO: 10766 - protein, 9 aa, synthetic construct
  REGION 1..9: note = short peptide
TQVIKVLNP

SEQ ID NO: 10767 - protein, 9 aa, synthetic construct
  REGION 1..9: note = short peptide
AVCGKVKCK

SEQ ID NO: 10768 - protein, 10 aa, synthetic construct
  REGION 1..10: note = short peptide
QSNETALHYF

SEQ ID NO: 10769 - protein, 9 aa, synthetic construct
  REGION 1..9: note = short peptide
KLWACNFCF

SEQ ID NO: 10770 - protein, 14 aa, synthetic construct
  REGION 1..14: note = short peptide
LSVAPQQSLVLLED

SEQ ID NO: 10771 - protein, 15 aa, synthetic construct
  REGION 1..15: note = short peptide
VCTIISDPTCEITQN

SEQ ID NO: 10772 - protein, 10 aa, synthetic construct
  REGION 1..10: note = short peptide
QLLPNSQSFI

SEQ ID NO: 10773 - protein, 9 aa, synthetic construct
  REGION 1..9: note = short peptide
VQQAGQLAR

SEQ ID NO: 10774 - protein, 10 aa, synthetic construct
  REGION 1..10: note = short peptide
SNSTARNVTW

SEQ ID NO: 10775 - protein, 8 aa, synthetic construct
  REGION 1..8: note = short peptide
QNLSFGAT

SEQ ID NO: 10776 - protein, 9 aa, synthetic construct
  REGION 1..9: note = short peptide
LQKLVRIQL

SEQ ID NO: 10777 - protein, 9 aa, synthetic construct
  REGION 1..9: note = short peptide
TRHDCPVCL

SEQ ID NO: 10778 - protein, 9 aa, synthetic construct
  REGION 1..9: note = short peptide
RTFCKKCGK

SEQ ID NO: 10779 - protein, 9 aa, synthetic construct
  REGION 1..9: note = short peptide
LTNNDLYRI

SEQ ID NO: 10780 - protein, 9 aa, synthetic construct
  REGION 1..9: note = short peptide
GVSGVCVCK

SEQ ID NO: 10781 - protein, 9 aa, synthetic construct
  REGION 1..9: note = short peptide
KMKLKQQRV

SEQ ID NO: 10782 - protein, 10 aa, synthetic construct
  REGION 1..10: note = short peptide
KSREDCCTKF

SEQ ID NO: 10783 - protein, 9 aa, synthetic construct
  REGION 1..9: note = short peptide
CTDCYSNEY

SEQ ID NO: 10784 - protein, 9 aa, synthetic construct
  REGION 1..9: note = short peptide
THDCCYDHL

SEQ ID NO: 10785 - protein, 9 aa, synthetic construct
  REGION 1..9: note = short peptide
THIQQAPAL

SEQ ID NO: 10786 - protein, 13 aa, synthetic construct
  REGION 1..13: note = short peptide
YCKNKPYPKSRFC

SEQ ID NO: 10787 - protein, 10 aa, synthetic construct
  REGION 1..10: note = short peptide
TNAVIFSQKI

SEQ ID NO: 10788 - protein, 10 aa, synthetic construct
  REGION 1..10: note = short peptide
TQLTMNVPFQ

SEQ ID NO: 10789 - protein, 9 aa, synthetic construct
  REGION 1..9: note = short peptide
TRCGCVTML

SEQ ID NO: 10790 - protein, 13 aa, synthetic construct
  REGION 1..13: note = short peptide
GPHQQSHQESARD

SEQ ID NO: 10791 - protein, 10 aa, synthetic construct
  REGION 1..10: note = short peptide
FLEDVLNEIQ

SEQ ID NO: 10792 - protein, 11 aa, synthetic construct
  REGION 1..11: note = short peptide
GEIICKCGQAW

SEQ ID NO: 10793 - protein, 9 aa, synthetic construct
  REGION 1..9: note = short peptide
EHCGCYTLL

SEQ ID NO: 10794 - protein, 12 aa, synthetic construct
  REGION 1..12: note = short peptide
PEGQPGPWGQAL

SEQ ID NO: 10795 - protein, 8 aa, synthetic construct
  REGION 1..8: note = short peptide
RQNVPRKV

SEQ ID NO: 10796 - protein, 9 aa, synthetic construct
  REGION 1..9: note = short peptide
LYAKCIPCI

SEQ ID NO: 10797 - protein, 10 aa, synthetic construct
  REGION 1..10: note = short peptide
TGGDNQLLLY

SEQ ID NO: 10798 - protein, 9 aa, synthetic construct
  REGION 1..9: note = short peptide
YSQEIENHY

SEQ ID NO: 10799 - protein, 9 aa, synthetic construct
  REGION 1..9: note = short peptide
YHCHCRIVL

SEQ ID NO: 10800 - protein, 10 aa, synthetic construct
  REGION 1..10: note = short peptide
KTNISHNGTY

SEQ ID NO: 10801 - protein, 10 aa, synthetic construct
  REGION 1..10: note = short peptide
TDQVIQNEMP

SEQ ID NO: 10802 - protein, 9 aa, synthetic construct
  REGION 1..9: note = short peptide
QSDCSCSTV

SEQ ID NO: 10803 - protein, 13 aa, synthetic construct
  REGION 1..13: note = short peptide
RSLSNSTARNVTW

SEQ ID NO: 10804 - protein, 10 aa, synthetic construct
  REGION 1..10: note = short peptide
RVQDVACRCR

SEQ ID NO: 10805 - protein, 9 aa, synthetic construct
  REGION 1..9: note = short peptide
PNNHIGISF

SEQ ID NO: 10806 - protein, 10 aa, synthetic construct
  REGION 1..10: note = short peptide
LAQAVSTQLY

SEQ ID NO: 10807 - protein, 9 aa, synthetic construct
  REGION 1..9: note = short peptide
KICCGIIYK

SEQ ID NO: 10808 - protein, 9 aa, synthetic construct
  REGION 1..9: note = short peptide
NIHSIVVQV

SEQ ID NO: 10809 - protein, 10 aa, synthetic construct
  REGION 1..10: note = short peptide
GADGNIFVFN

SEQ ID NO: 10810 - protein, 8 aa, synthetic construct
  REGION 1..8: note = short peptide
QSNEMVLQ

SEQ ID NO: 10811 - protein, 10 aa, synthetic construct
  REGION 1..10: note = short peptide
STNHTVNHTY

SEQ ID NO: 10812 - protein, 9 aa, synthetic construct
  REGION 1..9: note = short peptide
FTDCYKCFY

SEQ ID NO: 10813 - protein, 9 aa, synthetic construct
  REGION 1..9: note = short peptide
TGQILKQTY

SEQ ID NO: 10814 - protein, 10 aa, synthetic construct
  REGION 1..10: note = short peptide
CSDEASGCHY

SEQ ID NO: 10815 - protein, 9 aa, synthetic construct
  REGION 1..9: note = short peptide
TRCGCVTML

SEQ ID NO: 10816 - protein, 10 aa, synthetic construct
  REGION 1..10: note = short peptide
KKDSKNDNFK

SEQ ID NO: 10817 - protein, 11 aa, synthetic construct
  REGION 1..11: note = short peptide
KPSLEQSPAVL

SEQ ID NO: 10818 - protein, 8 aa, synthetic construct
  REGION 1..8: note = short peptide
  MOD_RES 8: note = METHYLATION
MPTLPPYQ

SEQ ID NO: 10819 - protein, 9 aa, synthetic construct
  REGION 1..9: note = short peptide
ARTAPRAGP

SEQ ID NO: 10820 - protein, 9 aa, synthetic construct
  REGION 1..9: note = short peptide
SECGKTFRV

SEQ ID NO: 10821 - protein, 8 aa, synthetic construct
  REGION 1..8: note = short peptide
  MOD_RES 7: note = 7,M,Oxidation
HDSVVSMF

SEQ ID NO: 10822 - protein, 10 aa, synthetic construct
  REGION 1..10: note = short peptide
RPLDEKDTSM

SEQ ID NO: 10823 - protein, 9 aa, synthetic construct
  REGION 1..9: note = short peptide
TLIESKLPV

SEQ ID NO: 10824 - protein, 9 aa, synthetic construct
  REGION 1..9: note = short peptide
TLNSLIYTL

SEQ ID NO: 10825 - protein, 9 aa, synthetic construct
  REGION 1..9: note = short peptide
  MOD_RES 3: note = METHYLATION
  MOD_RES 9: note = METHYLATION
TLENCLLPD

SEQ ID NO: 10826 - protein, 9 aa, synthetic construct
  REGION 1..9: note = short peptide
AKAETIQAL

SEQ ID NO: 10827 - protein, 8 aa, synthetic construct
  REGION 1..8: note = short peptide
KPLKVIFV

SEQ ID NO: 10828 - protein, 11 aa, synthetic construct
  REGION 1..11: note = short peptide
FVLELEPEWTV

SEQ ID NO: 10829 - protein, 8 aa, synthetic construct
  REGION 1..8: note = short peptide
RYGFVANF

SEQ ID NO: 10830 - protein, 8 aa, synthetic construct
  REGION 1..8: note = short peptide
FPTKDVAL

SEQ ID NO: 10831 - protein, 9 aa, synthetic construct
  REGION 1..9: note = short peptide
PLFQVPEPV

SEQ ID NO: 10832 - protein, 20 aa, synthetic construct
  REGION 1..20: note = short peptide
ARNDCQEGHILKMFPSTWYV
